United States Patent Application Publication US 2026/0191916 A1 - sequence listing, part 103

SEQ ID NO: 646 - DNA, 513865 bp, Oliverpabstia intestinalis
  source 1..513865: mol_type = genomic DNA
attctgtcactgaagaaatcatccatgcttgattaaatatacttgttatgctagtaataatagaaggaattttagctgctacagaatacaatccaacatctcctgctccattaaaataattcagcatcaatctatccgacgaatttgcaatccaccatgaaaccgcattaaaaattaatggtacagaaaatgttaacatttgccgcattaaatttttatccaattttgtatatataatttctttccatattccacatgctgttcccaaaaaaacaattgatactatattggcaattattaatgcattaaaataaccagctattccttgtttaaaaactattaaaaacaggcagcttactccacacgttaataatgaatacatcaatacatctattgtaaatattatattcttttcgattgccttagcctgaagagaaaaaatagttctaaacatatttaattttattaaaatagtaaaataagctgcccagtgtcctattgcatcatataatccatataccggagttaataaacaagatataattgaacctattcctacaataaaaacagcattctttattacctttttagcctcaacatctggtgctaatccaaagcgtaatacagcatcctgaattgataaagataaaaaaggaatcagcaaatttattgcagtcacaacaatttctgtagttccatattctgctgttgttaatgtatttgtataattaggaaccaataaatatgttataaatttagaaccaatactaccaattgcaaaaatcattgtatttgatgctaattttttaaatttatcattcacattaatcacctaatcccatctatcttttcaagtaagcctatacgatttaatatatctttaattatatattttatatgctgtttagtagataatggataatattgagtctgcaattcactcaatttatagttatctatattatcaaaaaattgattcctattaatatttggcactgccgaattcaaaaccattatgccatcttcgctaactgcttgattataatctgtctctttaaaaataaaattattgctcaactgatcaaaaattctaattccttttatcgaatttataaaaacatttgttgccccttcattatccaatcctattttgggatcttgtgcatgccacgcatcaaataaagtaaagtcagacacccttcctaagtctttaaaattacattgatagcaagatggcctagaacaaatttcagcaaagaaggtactcaaatatatatctggcggagtcatcactttatttgaaccatcttcaaaatatatttttattcctgatctatgatatcctaaagtcttatctctaaaattaacaaatactactctctttttatacttctgttgaatttcagatatgtacttctcccatactttaggtgaaggaacaccatgacacactacaccaacagttattaaattctcaggacttttccctaaaaatttaattaatccttctatttgacatggcgtacctgcaaaacaaattactttttttgcatccaattctttttttatctgcctataacaatcacctatttcactttgaacatatttagatccccttgccaaagctaaatcttcactgttcgtaattttggtatgatgcaccttcattttctcattaaacattggagcataaataagtcctcccgatgttaacacataatttgcaatacaagaaaagaaacctccagacgtactttcctttttaatcagtgaattcttattttgcactacatatgattttagaatttggatttcattcttctctttattaattacagggcatgtatgttcacactttttacaattaatacacaatgtattatctatatttggatacaaaaacccctctttatctggcaacattgatatacattgttttgggcaaacatttgcacaggcttcacatccacaacattgattcttctcactcaatatctgcatctttctaattccaatctattgcattttttaaatattttaaagatttttcacgtaactttaacagtttatcatcaacctcttcatagtttataatattttcattctctattttgttattatttattctattttctaatcctaataattttaacaatgaagctagtcgggtattcgttgacccctgaacctctttctcatacctattaaaagtaaaaaattctctatgattaattattgaaaaaactgttccgtgaaatgaatctgtacaaacatattctgcattttttattaaattaataaactcaattggcccaatatcatatggtgcataatctccaaaattttcatcatcagatataaattcatctaaatgtcttaacaccactattttatatcctgttttttcttttaatttttcggcaaattttcttttattcttacctttagccataaaatagcaaaaaatatatttttctccaattattctactcccattacttaaactatcccattctgctctagttaataatagagtagggtctaagacaacttctgaatttttaccagaaatttctttaacgatattagcaccagataattctctaacagaaatattatccatcccaagtaaaaattcttttgttttctttcttgtcattcgaggaattgctgatactccaaaacttgtagcataagatactttcttaatacctttttgaacccaagataatgtgtaataatcttcctcaatattttctggaagccacaactgatcacttcctacaataattgtagaatattttaaagattgttctctcaactgcttcctatctttgattggattcgaaaatctaatctgcgattttataaacgaatcaaacgcctgcattctatccttaataccattttcatattcttcagatttatgcatttcatttttatttatatatttatcatactttgctttgcgaacactagggtatcttaatttatgcaaaataatatttaatcttcttaaaaacggttcattagacacagaataattaatagtttcattttccacatttaactgatctaatatattttgcgttgcataagattgcaatgcacttccataattcttcacccaaaaacacgttacaagacctatcattaataaacctcctattcttctatgataccaattctattaaatgtataattatttcccgcaaattttgaaattataagcattggtaaaattgtacttaaaaatctagatagtaaaactgttgggtaataacaaaccggtgtcatagatgtataaattaatagtaatgcatacgcagcatatgcaaacatatctttagaatcatttagtttcttctgtgtttttaatgctattataacaatacaacaagtaactactggcgcaaaaattcccaaataatgatatgattgtatgataccaggacaaattgtgtatttcactccattatatgcgttatataagtcactaagcctatctccagataatccaaacaatgtgctatgaaaaggtatggcttcataaatatcaaaaaataatgtatttaaaatattattatctactatattaaatccacaagcaatattagttatacctggaaaatatatttgaaacatatcactaaatatttcatagatatttcctttcccaactgaaacagtaaatgcaacagatatgaaatagtacactaccacaattataccaacaacaatcaacattcttttcatgaaatttctatatttaggaaatatctttagcataaaaattccaattatcataactgttattaatatatatatattttcatttaatatcatcgcaaattggattacacataaaatagctcctactgcaacacaaccaaatttatcacctattttttttcttaattcatataaaaccaaacacggaaaaagaattctagtaaaatcaaaaaacacattaaaaagtgtgaataaaattctatcttttgaaccagcttgggcttccatttttgccaaaaaatatccgtccgttgataataatgaagaatcccacaaagctgaataggaatttctaatcaatggagatatagcatatgctaatatacaaaaaagaacacaaaccatcataataaatcctacaaatttatatttactttttttgtattttccattttttatagttggtttaaaagaatgtagttttcctaatttaaaatgaattttcccataaaaatttaaaacaatgtaaacacaacatgtttcaaaaatcattaatgcaattcctgcgttaacatttttttcagatagtttattcaatgttgcaacataactacctttataaagaaaatatatagctacagattccctaataaaaaacaatacatgaattattaattttgcaagattatgagaaaaatcaaaaatattttcatatattccatatgaaaaaaaattaataatcgcaaatgataacggaagaagtggcaagcatgtataataaattggtttatttatatccagcattacaaccattgaaataagcaaactcaaaacagatacaagtatccatattgctttttcaaattttatttttcttatattcattatagctaatatgtaactgttaaaatttacagttacatttcctcctcttaaaaatataactaatggagaattgttgcctttggtaaacagtaatcaagatcttccctacgttttcttatcgattttgctggaacaccaccaaccactgtatatggaggaacatctttagtaacgactgcacctgctgctattactgccccatctccaatatttactcctggtaatataattgcacctgtacatatccatacacgagacccaatagaaattggtttaaattgtgcagtaacataatcggtagaatctgtatcatgagttcctgtaacaaatttcgtatagctagaaatgttggtattgctaccaatttttaatcctcctctgccatctaaatgacaaaaccaacctatagatgtattttctccaatatctattgaatggggagctaatatatctgctcttcggaaaatcactgaatttttccctattttcattcccatagctttataaaagcctcgtctaatagtcctactcggaattttatttataatcatattaccaagtattatatttatcgccgcattaattttttttagcataaattctctcctattaatttacaaatattttacatttttctctagaattttattatattctttaattaaattactagcatgagtattttttgaatacatatttctattaaagctatgtaaaatattttcctgtaatttttttgatttcatatctaataaattcaacttatctattaaatcatttacatctccatttttaaagatatatccattaattccattatgaatataatcctgtcctgcacatgcatcagacactatgcaaggcagcccatattttcccattacctctggaattgttaaaggggccgcttcataccatacagaaggaaaaactaatccctttgcctttacagcatacttatctatttcattcgaatttttccagcccacgaaatcaaccattggatatttttttgctaaactatctaatattggtccatctccaattactactcccttacttcctcttaacttcattgcctcacaaaaaatagggattcctttttcttgggatactcttcctataaattaatatatattattggtctcaacatttgcattttcaatattttcaacatcaattggattaacaacaaaatgttcatgaataggccaaactaatgcttgcttaattttctctttactaaattctgagataaaaaaatagtgtaaatcatttccctaaataaaacttctatttataaattgtcttataattctaaaggctttatatatatatctttttttgtcacagttttttataatacatttacatcctaaaggtttacatgaacaaatttcattctttctaaaatcataaaagcatccattaggacataccgttccataatcatgtcccgtaattaccactggaatattggcttttttagttgctttaaaaatagaagatgaaagtattttgctccatgcatgacaatgtacaatcgtttcttttttatctaattgttgcagtaattgatataatttttcttctgcaaatttattattaattccctgcaataatccttttatcttacttcctttagtaatatctccctgatttgtagaaacaattttaacttttgaatttttcagttcttcacaaacaggtcccgttccacaaaaaaagaaaacatttattccctgatcagccaaagctagtgcactcattatcgccactttacctgctccaccattaatatatgcaaaatcatttataacaacaacatttctaatcatacgtttcaattactccttattggatttcgccaaatatttcagcaaacttctcttttgcaactttccatgtaaagtgttctcttacaaaaacactaccatttttactcagagacaatctcttattttcatttgttaaaatctctaaaacaccctttgcaaattcctgacttgaatctgtgacaatccaatcacgcccattttgtgcattaatattctcagctcctatagatgtcgtcaccactggaagtcccattgccattgcctcaagattcttagtttttattccacttccaaaggtcattgggcacacgaaaacactacactcttcaagatagtctcgtacatcttcaactcttcctgtaaaagtcacatgttctgattgaagttttaatagattttcagaagctcctccaccaacaaccaaaaattttactcttggacattctaacaaaattaaaggtaatatttctctgataaaataacgtactgcaaattcattatgtgcaacgcccaatgctccaagaaaagcaatcttgttttctttactgttcttatatctcaaagaaaaataatccacatctacccctatcggaactgcacaagctttatttttgtttaattctttatttaatatatctgcttcttgttgagccacgaaaatagttttatcgcattgttctgaaatttcaagttcataatgtcttaacaatttaatttcattttttacgacatatacttttaatggtttccatagcataattttctgaatcattttaggtagagtatttaaaaaagcaccatatggatttattccagttatatcatagtctagctgtctttgatatctcaaagagattcgatcgtccaaatcagctacgcgaaaagcattgtaatctctaatatattccgtactacgtaccatatctccgataataatgtctggattttcttcatctactaacgtatcaataatttttttggcttctggattccaataaagtgaaacttgcatcggttttctttttaacaatacagaatcaaaaagaatattctttatctttgttactgaagtcggttttggcaatatttctaatctatcaataaatttaggctttaaattaggatcatctcctttttcaagaaatgctgccactattagtttatatccaagttcttccgataaaattctacaataatgatataacgaagtttttcttcctgatgttgccggaaaaggtaatctcggcataacaaataaaattttttttgatctactcatttctatactccaaaaaatttatcttcaagcattaaacaccaacaatgataaattggtaaatgcaactcctgaaccatatatgtttctgtttctggagccttgacagcaacatctgctacttcagctaattctcctccttttgctccagtaagaccgataaccttaatacccaaagcacgtgcaactacagtagcaggcaacacatttttactatttccagaggtggaaattcctaagaatacatctccttcttttccaaatccaaataactgctgtgcaaatacacctaaaccatcaacatcattaatatatgctgtagttaacgcttcatgtgccactaatggaatcgccattaatgaacattccagattatttgcaagttgagttcctctctctggatcaatcgcaataagtttatctgcaaattcttttttaaccggacggggagttttaaatcttttcatcaattcaccagctatatgctctgagtctgctgctgaaccaccatttcctgcaattaacaattttccaccgttttcatagcattcttccatgactaaatacgcatcaataatagactgttcaatactttttaatgcagggtatctttctactaataaatcaatatgtttctgtaatctttcttctagttttctcattgctctaaaactcctttttttaccaattacaacattcgatctacaaactcttttaatgatgagactgtataatcctgttgataatcctgatttccaattaataccgttttacatccagcattttttcctgccaaaacatcattttcaccgtcacctatcatccaagatctctctaaatccacattaaaatcttctgctgctttcataagcatccctggcttcggttttctacattcacactctatttttaattcaggtctttctccttcatatcctttatgcggatggtgtggacaataataaagaccgtctatatatgctccatctttgcccaataaagtttccatcttattatgaattttatctaactcatcaaaactcacttcaccacgagcaattactggctggtttgttacaacaattgttaaatatccagattcgttcatttttttgattgccttagatactccatcaatcaattcaaattcattaatacttcttaaaaatccaacatatttgttaattgtcccatctctatcaaggaaaattgctttctgcttattctttaaatttttcccctgtacatgtccagctttaaaatcttcacatactgcatagtatctatctggtgttcccatatcttttacatattctggactgtcataacaaaacattttgcctgttccagataaaggttttaaaagctgtctatctaaatcaattttaggagtatcaatattttgtttcaaaatttccggtgacatcacatgaaggccagcgtttactctatttttataatacaatggtctttcatcttcttttgccagccacttctgtacaataccattttcatttgctataatcagtccactatcatatggatgactattaggatgagtaaataaagtaaccagtccaccatgggatttatggaattcaacaaaacgattaaagtccacatcaaacatagcatctgcatttaaaagtagaaaatcttctgtcagcttatctttaatcttgaataaagctcctgcatttcctaatggctctttttcaaaatagtattcaatattcactccaaaacttttacctgttactggtgaaataccacttccatcaccaaaataatccattattatattacccaaatggctcacagtgagaataatatctttaaatccttgatctcttaaacattcaatttcatgttctaaaacaggtttaccttcgattttgatcataggttttggaatatcactggcaactgaagaaattcttgttccctttccacccgccataattacaactttcatgttttatttctccttacactaatggttcatatgattctggagtgtaatgaataactcttgttcctccatcttcaaaagaaaatggaatatacatcaattccttcattgcttctctaacttctgcttgtttttctggttgcacataaaatactaagaaaccgcctccacctgcaccaagtaattttcctcctaatgcaccagctttgattcctttttcatacagaatatctatattgcttgtagaaactgcatttccagtttgtctttttaatttccatgtatgatctaacattcgtccaaattcatctaaatcgactgttttatctgttaataccttttccgcatcatctactaaggaaagcatttctttaagctgtgctgtcttgtctacttttcctgctgcatttgctttctgaacatctgatgaaaaacgtgtaaaaccagtaaaaaacatcatcaagttctgattaagttgtttttttctttctggtgaaatgattaacggaagcacatcatagccttcatctgtaaaattaatacgattaaagcctccaaatgatgctgctatctgatcctgccaaccaccagcttcctgacaaagttctctttccaaataaattgcttcatctgccagttttttcttatccgcatattttcctttcaaagcataaaaagcattcaacatacctactgcaaaagaactacttgttcccaaaccagaacgagcaggtaaatcagcctcatatgttaaacgaatttcatgcatatccaaaaacttcattgcatttttgattgccggatgctgaatatcttctatattagttactctttctgtttttgaataagaaagttccgttgaataatcaaaaaagcgtggtaaatggcgtacatttacataacaatatttgtcaaatgttgttgataacacagagcctccattttcacgaaaaaatgatggcatatcggttcctccaccaaaaaaggacattctaaaaggtgtttttgtaataatcatttaaattctcctgttattatatttataacttatctataattatcctttcgcagcttattctctctataaaataagctgcttgtaggatttacattgatccatctttcttaaacacaactaatactgttttaaacagaatctttatatctagcccaatgttccagtttgtgatatactctttatcaagacgaacgacttcttcaaaatcggtaatatcacttcgtccgcttacctgccacatgccagtgattccaggcttaattgccagccttgcacgatggtgaagctcatacagattcgtttctgaaatcaagggtgggcgagtacctataatcgacatatcgcctcgtaatacgttaaagaattgcggaaattcatctaaacttgttcgtctgataaaatcaccgattcctgtcttatgtgtcccatctggaagtatcttatttccgataacacgaggatcaaagtccagtttaaacatctttccatctccaagtttgttatctttcataagctctgccttacgttcttctgcatccatatacatactgcggaacttgtacattttaaatttctttccattctttccaactcgttcctgagcaaagaaaattggtcccggtgatgcaatataaattgccggtccgacaaaaatacaaatgattccggtaaaaatacatccaactaatccacccgcaatatccattaagcgttttaacattaactgtctggttgatgcataattgatacttgtcgtaaggactgtgtaatcaccaaccttttccacaaactgttttttccctggcacacttgtaatctttgcaagattaagatgaatggttactcctgtctctgataactgctcaattaactctgccggatacggaagaacttctgaaacaacaaccagaacttcgtcaatccattcctgacatacatacattgctgcagtctcttcgttggcaactaccggaactccatgaatttctcttccagtccagtccgcatcaattacagctacaccagccaatgagaatctggcataattgttttcctgcatacttaacactacttgttcagccacatcttctgatgttacaatcagtagtttacgttctccgccatccttcatctgttttcgcagaagttttttccaaagttctctgacaatatacgtcattactaaataaattattatggtcagcatcaatgttaatcttgaaaagtcctgtccctgctgaagcaggaataaatataaaactgccaatgcacctaccataatcgcatgatttaacgtaactacaaaatcacgatagtatcctctttttaatacacttttcatggtgccatacgcaaaaatcataatcagatctgccagttcaaggaaaactgccatattgcgataaataattgtttcatatggattaaatccatatccgctaattgcatatgccagaacatacgctaattgcaaacagatcatgtctaagattataaaatctgtgtgttttaaccatccttcagaatcttttctatacatagatttttttctttccccttccatttttttgtaatctatttgttaatctacaatcgtccccacaattgtagagattgccttcaaatttgagtgatttaaaactagataggattattgctacacaaagaagagcattaatccggaatatgttaagatttgttgagatatgtaattccgtccatagccataccccgaacacaagtaagcagcacatgagaatcacattttgaatatttagatatgcgatataagaatttcgatattcagttttctttttcttttcattcccattaatatgtactggggtatccatcgtacactttcgttttgatattcctatcatttcatatctcccttactgtacccccccccgacaaaatcgagggctactttcttatctcttttttctcatttatttcttatatttttctctaacgacagataacctgtgaacgtcttttgagggacattcgcaggctcagccattacttcctattatttatgattctcatttacttatttatgattgggtcaaaataagcatccaggaaaccactttattatatatattcccgctggaaatacgattggtttcctctaatgacaaatcataagaatcatactaaggaacctagccaagccagcgaaaaccctgtaaaatcaagctttttctcggttggctctattataccgccgactcctttcagtacattaaagaactgtgggaattcatccaggctggtgacgcggatgaagttaccgatgccggttttctttgttccgtccggcaggatttcattaccgatgacacgaggatcaaaggccagcttgaacatcatgccatcgctgacacggttctgtttcatcagctcggctttccgttcttctgcatccatatacatgctgcggaatttgtacattttgaatttcttaccgtttttaccgacacgctcctgggcaaagaagatcggacccggggacttcaggtaaatagcaggacccacgaacaaagtgatcagcaaagtcagcagacagccaagcagaccaccggcgatatcgatcgcgcgtttcataaacaactgttttgtggatgcatagttgatactggttgtcagtacggtataggggccgactttttccaccagttgttttttaccgcccatcgcctcggaaactttcgccaggttcagatgtaccgtcacacccgcttccgtaaactgttccatcagagcatacggatagggaacattggttgccggaatgacaaatacctcgtcgatccactcccggcagacataagcagctgcattttcttcgttggctactaccggaacgcctgcgattttcgtaccgcagagatcatcatcgataattaccagaccggataaagcaaagcgttcatagttattctcccggatattatgaacgacctgctctgccatatcttttgtcgtcacgaccaacagagaacggtttccttcactcatcctgcttcgaagaatttttttccagatgatccggacaatgtaagtgagaatcgcatagatcacaccggtcagatatagtgcggttctggagtacgcctgaccttcctgcatcgtaaacagatacagcaccgagaacagttccacaaggagcacatgctttaccgtcgctgcaaactccctgaaatatccccgtttcaaaacattggataatgtctcatagaaaaacatcacgacgatatccagcagttccataaagatcgccatgttccgatatagtggaactatgtagggactgccgttgtcatgacggatcacataggcaagcaggaatgcgatttgaagacagatcatatccagcaaaatgaaatcaaagtgttttaaccagcccttcgagccttttttgtacatctttctgtttccccctcagaaaacgagaactttacttttgttctcttattactttttcttcacttatttgtcatactatccaaaagtataacactgggtttatgcattttcaatataaatgcaatttttttaacatgaattgccatttttcgtcgttttataattattcagttctgaatctgttatttttttgtacaaactatagagaaccaaaaatgtgccttacgtatcctcgcggaatgttttttctttacatgaaagtaatttcctgtaagtaaaataagcaatgaccttttccggtcattgcctgttttctgttacaatacttttgataagaactcctgcagtctcggattcttcgggtgtgcaaagaattcatccggtgtattctcttcctggatctttccttcatcgatgaaaattactctggtggccacttctctggcgaatcccatctcatgggtaacaactaccatggtcattccggtctgtgccagttctttcatgatctccagtacttctccgaccatctccggatccagcgcggaagtcggctcatcaaagagcatcacatccggattcatcgccatggcacgtgcgatggcgatacgctgtttctgtccaccggaaaggctgtccgggtaagcatctgctttgtcaggaagacccacacgggcaaggagttcttctgctttctcagaagcttcctcttctttcatcagtcccagtgtcacaggagccagcatgatattctcttttactgtcttatgtggaaacagattgaactgctgaaataccataccgattttctgacggtggcggttgatatcaaccttcggatctgtaatatccacaccttcaaaaagaatcttgccaccggttggaacttccagaaggttcagcgaacgaagaaaggtagattttccggaaccggatgggccgatgactgctaccacttcaccctgacagatatctgtggtgataccgtccagaacctggttatcatcaaacttcttctccagtccctgtacctgcaataaaacttttcctttatttgcggtcactttttctcaacctcctctccagtttacccataaagtatgtcagaatcgttaccagcacccagtaaaatactgcagctgcgatcaacggtacaaaggcttcgtatgtacggctctgtaccagtgtcgctgctttcgtgatatccgtcataccgatgtaaccgatgatagatgtctctttcagcagcacgatcatctcattgatcagtgccggcagcacatttttaaatgcctggggcataatgatcagcttcatcgtctgtccggaactaagtcccagactccgtccggcctccatctgtcctttatcgatggacatgatacccgaccgcacgatctccgccacatacgcaccggagttaataccaaatgccacaccaccaacgataacttcattcaccgcgatggaagcaaatataacaaagttaaatatcaacacctgaaccatcgtaggcgtaccacggataacactcagatacaccttacagatcgcattcagcaccttcagcttccctgtctgctcataagtcgaccggataatcgccaccgtaaacccaagcaccacaccaatacaaagtgccagcaccgtaatcagcaacgtattccgcaaacccgtcaaccaccaactggaagccccattatccacaaaatacctgtgaacccaatgacttaaagattccatatcgtttcccttacactccttttacaaggtcttttcgtatttctcttactctatctcttatcttacagggattaactctctctttttaaactaatataaaagccatccccaattgtcataaaataaatcttatatcctcccgcctgcgaaggttggcttgatctttccatacgcagaccatctgggccggccggtccttaggcagcgtattttgctgccttagtaccgctgccaggaccagctgagcggaagcgggtcggagtatggaaagatcaagccaacccctcccgggtaaccaatatttattttctaacaatcacaacctgagacgcattcgcataagtatctgtaaaatcaacactctcttttctctcatctgtcacagtcataccagccgcaccaaattcagccttaccactggaaactgctgccaggatagattcgaatgccatatcgtcaatcttcaaatcataacccatcttgtcgcagattgctttcgccatatctgcatcgattcctacgatattatctccttctttatactcccatggctcgaattctgcgttggtggccatggtcagagtaccgtttgtatactcggttccttccggagtctcgtactgatagcttccctggtcatcaccgatgtagtttgccatgatcttatccagagttccatcctctttcagttccttgatagccgcattcattttctctgtcagttctgtatttccttttttcagacagatcgcatattcttccggttcccagatattttctacgatcttcagatcatcgttggcatctacgaacttctgagccggcagagagtcgatcacaaccgcatcgatcttaccggtcttcagagcctggatggcatccgcacctttgttataacgtttcatctgagaatcacttgctactgcatcgctggcatagctgtctccggtagtaccggtctgcacaccgatggtcagatctttcagatcatcaacactggatacctctacctgttttttgctgccgcatccgaacatggatactgccataatacctgtcagggcaaatacaactgcctttttcatactcttatcctcctgttattcttgtgtactcacgaatctgcatatagttttccggctgattcatccttctgcatatctatacagtgtgagtgcatttttatactgattaaaatcttctttattataacagctttttatttttttgcaaccgggaattactgcctgtagggttctttttcagacacgctctaagaaaatctttcttttatcagccggtcaccgttccggatccgctcttcccagtccgggaagtcttcttccagaatctcccggaaagcctggtattcatcaagaagtccctgaccgtggaggacacgataggctccggcatcacttccgagagcaagttttgctccgagctgatacccacagagtaatgcttttttctgtccttcccagatatttttcactacttgttccggaaaccgtccgtctccgagaagattttttactgttactatcgtaggtacccagacagcatcggaagctgcaagtgcctgaagcgcatcttcgtcgcagaagtttccatgttcgatactgtccacacctgcgagagctgctgcccggactgcctgactgccgtttgtatgtgccatgacggggaacccttcttcatgggcaatatggatcagttcgcggatctcagtgtcggcaagtgaaggttccgtcagacctccatgagtaaagtccatgatgccggagatcataattttcacgaagtgtccgccctgccggcgcagatccccgatcaatttcctgtactcctgcatggtttcgtaacctcttcccacgatcgctccgtagtgcccctttttgtgaatggcaaagatcggtgtccggtaggtgatcccataggcaggtgccagttccatcgtccgttttgatgttccgtagatatccccaccttcccgcaaccaggtgattccgcgcttccggtattccgcaagatgcgcgtggatcacccggtcgcagacaccatttttctggtcggctacggcttttttatagtctgtgccgttcataaaaatgtgcatatgggattcgccgtatgggaattggtttattgtttttctttgtagctgttgtttcatattctttatcgcctgtcctcgctatcgttgctgttcactccgtgcccagtaacctcatcatattctatttcaatctttcacatataaaacacttgaattctttgatacaaagtgataatatttaattaaatcaaaactgatccattagatcaattattgatttgcaatgtaacagaaagcacccactccaatggtggatgctccgagtttaggctttaacttatgtccttaaggacgcggcctatcctgtgtgctgacaggataggcttttttattttcgcttctttctcttatcgaaaaaggtaagcaacgctacgaacatgttaccaagagatatcaataatgccaatatcccaataacaattgaaagaatttcataagctgtcatcgcgccacctcccttcttatgtattccgccaaacggtagcataacctcgggaggctacctcaccctgtcatgggtgctttccttgcataatattttatcacacatatggtattttatgcaagcacgtttctgtatttttctgttatcgtctaatctctccgatcatcgatcatatacagcaacgcattgcagatgcacgctgcgatattgcttccgccttttcttccccgtgccacgatatatgggacatccgctttcatgatcagttctttggactgtaccacgttgacgaatcctaccgggactccgatgatgagtgccggattcagttttccctcttcgatcagttcgtagagacgtaccagagcagtcggagcgttaccgattgcaaagatcagtggtttgtccagctgtgctgccttatccatacttgcagtggctcttgtggttccgtttgccttcgctgtggctgccacatcctcatcggacatgaagcagtaaacctctccgccgtaacgggcgagggcacgtttgttgatgccggatctgcccatctgggtatccgtgacgatacaggcaccctggcggatcgcatccatggcttttgccacgacattgtcagaaaagcacagactgtccgcatattcaaagtctgcacttgtatggatacagcgtttgatgatcagttctttgtccgggtccagtttccggtcgcccagttcttccgtgatgatctcaaagcttctgcgttcaatatctcttggttttacattttccagttctattttcataacttatacccctgcttccagaatctcatatattgccttcatatccagatgttcccgcagcgctgctgccagaatatcgtactgtgtctctttgaatgtctgaaaatccacacctttcatctctgaggtatcaattcccttctttttccccagtgcccggatcacagcctccgccacaccttctttgtcaaatacaccgtgaacataggtgccatagacacgggaagtatacgcaccatcctgtttttcctctgtggtctttgcatgatcccggatcgttgtcagcggggatgccccttcatgtaaagtcgtcacacccatatgaatctcatacccttccagctccacgccggaaagctgggaaagttcgccctctacctgtccgaatataccactgactctggttctggtctttccgtctgcaaatacggtatccatcggaagcagtcccatccctttcatggttccgcccgcttccacaccgtccggatcggaaagtgtttcccctaacatctggtagccgccgcagacaccgaagatcactgttcctgctgctgccagtttgaggactgccgcctccatgccgctctcccgcatccactgcaggtctcccatagtattctttgttcccgggagaatcaccatatccggatgcttcagttcatggatatgctttacatatcgaagagacacacccggaatattttcaaatggattaaaatctgtaaagttagagatccgtggaacccggatcactgcgatatcgatctgtcccacctccttctgactgtcaaaccgctccgtcagactgtcttcgtcttccacctcgatctgcaggtacggtgccacgccaactaccgggatgccgcttcgttcttccagcatctccacaccgggatcaagaatggttttgtcccctcggaatttgttgatgatcagaccctttaccatctctttttcctcgtcttccagaagcatcaccgtaccgatcagctgggcaaatacgccgccgcggtcgatatctccgaccagaagcaccggtgcttttgcaagctttgccatacccatattgacgatatcatcctgctttaagttaatctccgccggacttcccgcgccttcaatgacaatgatatcattttctgctgccagcgtatcataggccttcataatatccggaatcagtttctttttgtatgcgaaataatcccgtgcactcatatttccaaggacttcaccgtttacgatcacctggctgcccacatcattggtgggctttaacaggatcggattcatcagaacagacggcctgatgcctgccgcttccgcctgcatcacctgtgcccgtcccatctccagtccttcttctgtgataaaggaattcagtgccatattctgtgatttaaacggtgccacccgatagccatcctgtttaaagatccggcacagtccggctgccagcaggctctttcctgcgttggacatggttccctgtatcataattgcttttgccatgatttatctcctcactttccgaatcttttctaataattgttcgttttctgtatgtagctttactgcgatccggtaacagcctttccagagtccgggataattgctgcagtcccggatcatcacaccttcctgcagaagtttttcatacagatcaggctctccctcaaaaaacagataatttgcctgggagtccagcaccggatatcccattttcatcagtccctcccgcaggaattgccgttcctgaaagatcagtgttctcgccttctccacataagctgtctctctcagcgccgcagttccggcttcctgcgccggtgtggatacattccacggctgcagctgagcttcgatctgcgtcatcagtgtttcgccggacgtaattccatagcccagtcgtaatcctgccatcgcatatcgtttggtaaatgctttcagaagaaacagatacttctttcctttcagttcaccttttaaggtatgtacttccggtttcggaacaaaatcaagaaaacattcatccaccaccagatagatctgtcgtttttcgcagagggttacaatctttcgaagaagtttcggatccatcagaataccggtcgggttgtttgggttacacagaaaaaccatttgcagatcttctttttgcagtctgtccagaatcctgtcctgcaaagtaaatccatcttcttttttcaggatctctctgttcacctcacatcccacagcttccagtgcctgggcatattctgcaaaggtaggtgccagtaccagcgctcttttcggctttaccgcctgcaccagtgcaaagatcagttctgccgccccgtttccacagatcagccattccaccggaacctgttcatattccgccagcgcctgcttcagcttttcctgacaggcatcaggataatggcagacccgttccatgctgtcttttgccgcccggatgaccccgggcggtgttccaagcggattgatattcgctgaataatccagcacatccgggtggcggtagatatctccgccatgtatgtattctttcatgagtccgttgtttctcctttttgtatctgttttttcttttattggtacaattgtaactattcagtaggtagcattccgcgaatcgttttggcatgtttatgtcaaaatgccatcaccgaaggtaattagaaatgctttttgactcgtaactgtgagggtactgaacagttacggtatatttatataaacacgcagaccagaacacgcaccagtccaaataccacaagtgacagtaccgttcctgcatacatcagtttatgggatcttatgatatcctcaatctctactttccggatcgaatcaccgatatatggttttttatgcagttcgccaaaataccaggcatctcctgccaactggatatccagtgcaccggccatcacagcttctgtctgcgcagagttcgggctggcgtgttttctgcggtcgcgaagatagattttctttgcattttttccatccataccgatcagccaggctcctgcgatcatcagccaggcggaaagtcttgcgggaatataattcaacacatcatccagttttgccgccgctgttccaaaataccggtatctgtcgttcacataacccaccatggagtccatggtattcacacttttataggcaaagcccagcactgcgccgccgatcatcatgtaaaacagcggggcaatgataccgtcggaagtattctctgcaacggtttcaactgctgctttggttacgccttcttcggtcagattctgcgtgtcacgtcccacgatcatcgatacagcgtaacggcttttttcaatatctccggtctgcagcgcatcgtagacctttttactctcgtcacgaagggatcttgccgccagcagctggtagcacataaagctctccagcgccacccccagccaggtgcggaatccatatgccagatgcaggatcagccacgggacaaaagacgaagccgccacgattcccaccaccagcaatcctccggcgatccgttctcctgtttttgttttcggaaatatcttccgcaggatcttctctaaaaatgtaatcccatgcccgatgatacgcaccggatgatacagccatctgggatccccaaaacacagatccataaggaatcccagtactactgcaagtaatgtccacttcatcttttcttcctctttctgtagccatctgcttttttgcagttacgccttttctatttctgttcttattatctacactactgttgttttgtcatttgtatcggatttaccacacgcagcaccggctgctgtcctgatgcatcgctccacgcagccggatctgcttctgcttcatatccttctccgttgcccacatgccattcataaaaggctttttttctatctgcgaatcgttccagcactgccatgataatgccaccatggacgacaaaagcagcggattctgttccatcttccgcgcagagcttcaatccttccaggaatccttgacaggccctgtcccggaattcctgtggatcttcccctcccgggaagggcagggttgcattgctgtccacccacgcctgatactcggcatctccggtcatttccttccagtttttgttttcgaatcttccgaaatcacattctctcaggttctgaatcacctgctgctcctggcccggatagatacaggccgctgtctgacgacagcgaagcaggggacttacaaaaagtctttctgctttcggatagttctgttttttcagctgttcctgatcctcttccagaaccggttcatcggtgatcccgatatagcgattcagctgattcccaggtgttttcccatgccggatcagatatattctcatctgttttctccttttctcacttgagctgtgttccgatcccacagcagacgcgcactacctgagctgcatgtgccgcaagttttgtacatacccgaccgcatgcttctctccattcccggtctttcgcgtccatcgggacgattccgtagcctacttcatccgttacaatgatcagatcaggattttctttccatattatttctgcaagatcccggactgatcctccttcgtccagttctcttcggataaaggagtggaaatgatggactgcttttgctgttttcagatcttctatcgtgcaggtctgaccgtctttccagtcgggatcggtcaggttgtatgtttttgatgcgtaagattgttttccctggtaagcaccaccgattattaatatcattgttggttctcctttttaatgataagtttgttggataggttgtggtggattcgatcgattgctcatcgcctcgcggccgcgggtctgcgctcggtctgagcctgtagtctcagactcgtgctcgacaagcgctggctgcgaggcgataagcaatcgaccgaatcccttcaagagtactggctagagcgtgtctgaaaaaggcttttcgtgagctgcgagtctcagtttgtgggagattttatccgaatgagggcggcgtagcgggctacggcaaccgaatgagggtaaaatataccgcaaagtggggcttgcagattgcggaaatgatttttcagacacgctctaggacttattgctatacttatttatctattttacatcccaataaacaactatatctatctattccttcatttttaagggatatccagtgaccctctccataccagccacctcagtctccaccaaaactttgcctggattttccctgcgtcccctctgcgataccgcagtgcttgtcgagcacgtgtttgagactacaggctcaaaccgagcgcagacccacgcggtgtcgcagaggggacgcagggaaaatcttacacagcatagttattcaatctcatcttttaaagccaaagtgcaccaagcactgccccgcaagccataaacacctcacacagagacaaaaagcaccccgccagatccccggtcgttcctccgaaatacttcatcgcattccgataataaagggcataaaccagaatcgctattccataaaccagaagacccagtttccagtccaccagcagcattccggccagcagtatcagcagatacacacacatcgtggcttttacctgcctatccttcgccccgcgtgccatagcagaaaccgatccggtcttttttgccttcggaaatgtcacgattgccagcccgcttaatgtccgggacagacaaaatgtaaaggggatcatcgccagggcacgggcactgatctggctgtatacaccataataaaacataaagtaaaccgcacaggtaatcaccgcaaatgctccggaattagaatccttcaggatctccagccggcgctcacgttcctgccatgaactcatcgcatctgccgtatccaacaatccgtccaggtggatccctccggtaagaaaccatgggatcaatgtcaggatcacggtataaaaggctgaggaaagcccaagatacgttccgaacgtcccccacagccaggtcaccccgccgatggcaacaccgatccatgggaaaaagcacatggcatatgccatattttcttcattccattcacactggggcatcgggatcttcgaatacatggaaaatgcaatcagaaaactatgataaaatttcttcattttttctctcctcgcctgtctttttatgaaaaatcggaattccgtagacaacctctgtgactgtatctgcgatctgcgccatctgacagttgatcgtaccaagtttttccagatatttttctgtctccggatcgtaggtgatgccgtcggaaaagacctcgttcgtcactaccaccagatttcctgcctgctccagcagatggtggattccattcaggatcgccttcacagtattgtccccggctccgccttcctgatagatctcattagccgtcagattcgacatgcactccagcagtacatctgccccctgcggtatcgtaagatgctccagatccgtataacgctcaatcgtcgtaaactttttctctgcccgcatggcacgatgtctcgcgatcctccgatggctttcttcatcaaacgggtacatcgtcgcaatatagattcttttatttccctgacaatccaggatacactgttccgcaaatgcagattttccgctgccgcttcctcctgttactacatgaaacatctctgatttccttcactttctcttcttacaccaatggcacataattttccatctgattatcggaaaacgtgcacatgcctccatacaccgccagcgccatatcaaggatcggataaatcgttaccgctccggttccctcacccagacacatatcacagtctaaaaataccggaatatccagtgcctccaggatcatcaccgtcgccggttcttttgatttgtgtgatgtgattacataatctttcactgccggacagatccggatcgcacacaatgcagccacacaggagatgaatccatcggcaaccaccgggatccgacaggctgctccgcctaagaatacccctgccataccggcgatatcgagtccgcctactttcgcgagcacatcgatcggatcttctttcttcggtttatgcaaggcaatcgcatctctgatcacagaaatcttctttttcagtcctgtaccggaaagtcctgcaccgcgtccggttacctctgccggatcctgctccagtaaaacggcagtcactgcactgctggtcgttgtattgccgattcccatctcaccggttgctatgattccataccctttttctttgagttcttccaccatatggatgccgacttcgagtgcctggacagcctgttctcttgtcatggcaggctctttcgccatattttttgttccgtacatcactttatgctgaagaatcgtgctgtccgtagcaattccgatgtccaccgggaagatatctgcgcctgcttttttacagaggatacttgctgtagccttttctttcagaaaattttcggctactattttggtcacttcctgcccgctctgtgtcacaccttcttccactacaccgttatcggcgcacatgaccaccagagcttttttcttcaggtccactctggcattccctgtcataccggcgatacgaacgaccgtatcctgcagccgtcccagactgtgaagcggcatggcaatattattccagtgtgccagagccacttccatggctgtcttatctgccgggtgtatcttctccagcgtttcctctaacgtcatacttatgccttcctttcctcacaggtgcgtaagaactgttccggcacctgcagattgctgtaataatacatatgcggaaatccgctcattccctgtctgtcactgtgtatacagttccatgaccgactgctcagtggtttcctggccgtatagctttccccgcagttatccgaatcaaaataatgaaattcatgggcccggattcctcccacattcttcccgaaacacgttccgtcttccagggtaatataaccgaatctggtaagccggggcgtacgccaggatttgccgggaataacaccggccattggccagctgtgtccttccatgtcctccatctcctgatgcagatacataaaaccaccgcattctgccatatagggaatacctgcctgtaccgcttcacggacagaagtaagcatttttttattctcactcagtgcttttgcatacagttccggatatccgccatgaaaaagcattccgtctatattttccgggagtttttcatcatgaatgggagaaaagggaatcagctgcgcacccatttcctccagaagctccagattgtcctgatagaaaaagcagaacgcttcatccttcgccagagcgatccttacgcttctttttgtatgataaccggtcagtggttcctgaacaggaagttcctctgcaccttctgccagttccagaagtccgtcaatatccacggatctttccagaatctctgccagtttcatcagtttatcatgcagatctgcgatttcttccggcatcaccagacccagatgacggctttccagcacgcagtccttcaccaccggaacatacccgtacactttcaccggcagggtttcttcgatgatctgctttaaccgaggatacatcattggggatatctgattcagaatcacaccacggatctgactgtcttctctgtattccacaaagcccttgacaaaagctgccgcagacagactcattccctttgcatttacgatcagcaccgcgggtgtgtttgtgattcttgccacatcataggcactggctttcggagagatccccgcaagtccgtcatagtaacccatcacgccttcaatcacagaaatctcacagtctcttgcatttttctccagaagataccgcagggtatcttccttcgcaaaaaagctgtccaggttcctgctttttgttccgatcacacggctgtgaaacatcgggtcaatataatccggtccacacttgaaagaagcgacctgcaggtttctgttttttaatgcctgcagcagtccgcaggtgagcagtgtctttccgcttccgctcgcggctgccccgagaaggattcgcggcactttgcgtttgttatccatttgtttcttcctttccccggcaggaaatcacatagaccggattctgtcccatcatcagatgataagatcccgcttttttgccttttgctacctgcacctgtgcgatatccacctgctcaaatggcagaacattcagacagttcatggcctctcctacggattcgagagcgatgcagttgatcaccacacggatcccgggattctttgaaagcagcagtttaaggatgtctttcatgttaccggaggagcctccgataaaagcatgggtcggtaccggcagatccacgcaggcttccggtgccagtccttcgacaatctcaagattatctgctgcgaacttttctttgtttttatataacagttccacagcctccggttttttctcaatcgcatatacccggccttctaccgcctgcatagccatctctacggatacagaaccggttcctgctcccacatcgtaaacaatcgaatgccgtgtcagctgtaattttgacaaggagatgcctcgcacttcctctttcgtcattggcacttttccccggataaatgcttcatccgggatcccgtgtgtcacgatggcttcttttccctctctggtaaataacacgacactgagactgtccgtctcaagttctgtcagctgccaggcatatccccgggtgatcttttcttccgggtaagaaagccgttcgcccacctctacccgtacatcacccatgccgtagcgctgcagcttctgacacaattttgcgatgccgtctgtcgttcccacaatagcaaaaatctttccgtatatacgcagaagtccgggcagattgcactctcttccatgaaggctgaccggatgaacatcttcccacggtgtttccagttttgcgcagaaataaatcatagaagatatgccacagtacacttttttctgtatcatcggcagttcccggtgcagtgtctccaggagttttttggctccgctgtagaatccgacatcccctgagagggcaatcgccacgtttctgtgctccggatgagccgcaatataggcacagatttcttccggtttgtatccggtccagacttcctggcccggtttccggatatgttccaccatccgtgctgctccgatcagaagatccgcacactccagtgcctgttttccttcctgtgtcagagtatctgcagttcccataccgattcccacaagagaaaccttttgcccccgaaggatatcctcagtttcttctccttcggttaccgcttctgtattttgcgttgctacttcctgcatgacaggttcctgcgcaaccttttcctgcccgctgccgggattctctatattttctgtatcagtattgacaatttcaatttttgcatcatttgcaacattttctttcgggagaaaccggcgattcagatactcgatacatttctccagttccatgccctgttcttccttcggtcgtccgatgacaatcatccggcagccggtttcttttgccgcctgatatttttccaggaatcctccggctcttcccgattctttacttaccatccatgcgatatcaaactgatggatcagtgcgatattcatttcccgggaaaaaggtccctgcatgcacagcagatgtttcccttcgatgccaagttttgcgcaggaagcgacaacttccaccagagaaagcactctggcatagattctttcctgataatcggtcagtgccgtataggcagacagttctttgctcccggtggtaaccagaatatttccactggttttttccagatattccaccgcttcccggatgctttttacatatgtaatggtttcttcttcttcaagacgccggctttcctgacgcaccacccgcagataggcagttccggtacgttcgcaggcggtctcaatattttccgtcactacctgggcatacggatgagtcgcatcgatgaccagcccgttctccatctgtaacatccgctcttccatctgcttttcatccagacgttcgtgggataattccagatattcaccctgcggcaacagactttctccgtattccgtagcgacacataccatggacggtattttattttcattcaaatattcggccacggtgcgtccttccaccgtaccgccgaacagcagaactttatacatttcgatatcccctcggtgttaccatcttaccgttaatctctttggtctgtgaattgcccacccatacggtcgtaaacatgtctaccttcgtatcccgcagggttttcagatccatcacttcataatgttccccatctcttccgatgtagcttacgataccgcatacagtctccgggctcttgtactgcatcatcagatcgcaggctttctgcagataatcgcttcgtttcctgctggacgggttatacagacacacaacaaaatcagcctctgcagctgccagcagacgtgcttcaatcttctcccacggtgtcagcagatcactcagactgatcagacagaaatcgtggatcagcggagcacccagtactgccgcaccgccggtcgctgctgttacaccgggaataatctccagttctacttccggatagttgacaccgacctcatacatcagtccggacataccgtacacaccggcatctccgctgcagatcatggaaactacttttcccttttttgcttcttcaaaagccatcacacaacgatccacctcttttttcatgggagtggtcaggaattctttccccggaaaatgttcttttaccagatctacatatactgtatagccgataattacctcacttttttccattgcatgaattgccttcagtgtcatctgttcgtattctcccggtccgataccgattacatataatttattcaaagctcacactccatttctttattgtacacgcagcggtcactccctctgcggcctgttttctcatgataaatgttccgccatcgcaggcaaggctggcacttcgttcgcatacattgtccacaccggtgatcttgctgacaaatgcagatggcgtaaaggtaccttttgctttttcaagttcttctccacgataagtcacaaaaggaaggtgatatttttcacagaacgccagcagtcccggctcttcttttttcagatcgatgctggctgccaggataatctgttctgcagctattccatgttctgacagatacttctgaatctgtgtttcgatcttttcttccggtgtgtttttcctgcaacccaccccgagatacacatttttcggatacagatgaagcatccgagtctgctctgttcccagggcttcttcctgttctctgtcactttgcgggattgcaaaccataaagttccctgtttcccatccgggctttccgtcttccggaatcgcagctgtgccggaatggtctgttctttcggaaagacgaatccttctccggctccccaggcaatagtttttccccggatcagcaacgccgccatctcttttgccagctccatatcagaaatcaccagattgtttttccgggcgaagacatccaccgcaaaagtgtggtttacgtctgtccctgtggtgatcacgggttgcgctccgatgctttctgcagcgaattccgtcagttcgttcgctccgccgagatgaccggaaagaagagagatcgcatagctgccctgttcatcgatcaccacaaccgccgggtctgttttcttacttaccacgaaaggagcgatggttctcacagcgatcccggtggcactgaaaaagatgattccgtccagtcgggggatccattcttctgcccattctctcagtgttcctttcactttccgaaaaggatgtttttcaggaagctctacatatttacttttcacaaaaccatacacctcctgatcctgcttttgcagatctctcagaagtttttctccaaggacacagccatgttctgtgaatgcgatgattcctgtctttttcatcttattttgttgcttcccgaaactctgtggtgaatgccggattatacagttctgaccggtcatagtggctgtgagccaccacatcaccgatgatcatcagtgcggtctttgtaatattgttttcttttgctgtctgtgccagcgttcctactgtacagacgaatgttttctgatcttcccaggtcgctttgtatacaatcgctgccggagtatcggcggtgtaaccaccctcgatcagtcttctgctcagttcttctaacatgcctgtacttaaaaagacaaccatcgttgcctgatgggccgcaaaggactggatgctctctttttccggtaccggagttcttccttccattcgggttatgatcacgctctgtgatacatccggcagtgtgtattccaggttcagcgcggatgccgcaccacagaagctgctgacacccgggcaataatcaaatgcaatatttttttcttccagaacatccatctgttcccggatcgcaccatacaaagaaggatctccggtatggagacgtaccgttgtcagccccttttcttccgctgcaaagatcacatccagaacttcttccagtgtcatcttcgcactgttgtagatctcacagttttctttcgtgtattcaagaagctgtggattgaccagtgagcctgcatagatcactacgtctgcttcttccagaaatttttttcctctcagtgtgatcagatccggtgcaccggaacctgctcctacgaaatgtaccatatgttttctcctctcttgtccctggcgtcaggcactcttattttctcttattttttatcttttacgaccagaagggtataatatcctgcttcttccggtatctctttggccgatgcatagattttttcttccggcatgccgcagttttcaatcattacggcattctgtccgcttcttaaaatgctgtctcttacttttttcaggcgtttgccgcttttcatcagcactttggttccaggcagttttaaaagatcatccatttcttctgctttataggtcgccggaatcacatggagcggttctgccatctccgccagacccatattaagacgggccgccactgcacagaaagaagtgatcccgctcacgatttcagcctgataaccgcgttccaggatacgtttatgtacatacagataagtggaatatatagtaggatctcccagtgtcaaaaacaccacattttttccctgtttcagataagattccactgcatctgcagccttattatgattgtcttccagtactgccctgtcttttgtcatcggcatagccaccggaatcagttctttttcatccagttttggatatgctccttttacgatctgataagcgacactggcttttatatcgttgcctggtactgcgatcacaggattctcgcggatcagacgaagggctttcagtgtcagcagttccggatctcccggtcccactccaagtccatataatattccactcatagtgttttctcctcgtttttctgttgatttggtttctgttctttatctgcacattgatcgtgtgcttttttttctgcctgcttcatgattttccgggcgagttccggaactttcgaggtttctgccagctttccatatacattggaaaataagatagttcccacttccagctgttcgcctgcccttttattcagatagaattctacccggtcactgatttctttcatcgtagcttccagataaccctttcgttttaaaatctccacactctgctccgtggtgatcgtatcaagaatctcttttgctgtctccagatctgcgccggcgcggatcgcattcgctgccatcagttcgcttcgactgtctgcctggcgggaatgggtattcatgattccgccggctactttcacaaatttgccgatatgggagataaacaagataccctttactcccagctctcttgccatatccagggtctcccccacataattgctacatttcatcgaataggtaagatccagtcttgtctgttcttttgaaaaagcctgaccgtaatttcccggtgtaatcaccagataagacccgccgccttccaccagcatcttcatctccagccgcaggctggccaccagtgctgtctcactcatcgggatcacgatgccacttgttccaagaacagaaattccgccttcgatacccaggcgtggattaaacgtcttttttgcaagctccactcctgccggaatctcaatctgcacatccagacctccggtgtagtgatattctttacagacctgctctacattttcaaggatcatctgtcttggaaccttgttgatcgccgcctcgccaactgcctgccacagacccggtctggtcactcttcctacgccgatccctccgtccagagtaatctgtggtgcatccctgcgggaaacgtttgcatatacatagattcccgtcgttacatccggatcatcaccgccatccttctgcacggcacagcgcacccttccctcatccatggaaatctcctcgatcagcagatgcagtaaaattccttttggtgtctgtaaagccacctcttccactttttctccggtcagcagcatccgcgttgccgcctgcgccgcagctgccgcacaggaaccggttgtataaccgtaacgaagttttctgtttttttcatctaccgcataatacccttccagaccggtgcggtgtgtttttttatccatattattttttccaatcacagtttacttttgctttgtcttgttgcctgcatacatgaacaaagaatgtgtcttggcacattctcgcggagcgtttttactttgcaggaaagcagtttcctgtaagtaaaaaaccgttgtcaaaaagacaacggttttcctgctcatttctattctgtaatccttcggttgccgcaaatgtttacagtcctcaccatacagagagtactccgactttaacggtaacggacttgtacaggaatttcacctgttttcctgcaactgtatgtgataaatttttcacgacaatattataaactctttcctgtaggctgtcaatgatggatagtatcaggattttttgatccaggtgctgtagaacgtcgtatttttataggtaaatgcatgtgttttttccggatccagattcgcattctcaaatgcttttggtgtcataaatcccagatattccagcatagtatgaccttccggaatcttcagttcttccagtatacctttcacttcatcgctcagctcatcggtcttgttattatcgtaagcatcacagattgctctggcgttcgcaacagctttttttgcattttccatcgctgtaccgcctttgccgctcacgatgagattcagactttttgtcagtgctccgtctcttgccacttcaaactgtgttgcctgataaatcatatttttcgcttctgatggatatggagccaagctggtcttattggtccgcatacggtttaacataaccatcgcgacacctgtcataccggtaagtccctggtttgccgactctgcatagacagctgccgcaaggaactcgtcctctgttacatccacacccacctgaggatcggaaagatatgttttcttttccacattgtattttcttccattcgcatcagtcacctgaagataacggttttcccggttcgtgcatagtccgttggcatcgaatgtataaacataacttccgaggctgtaatctttaccggctaccattctgccgtatttatcaatgtaataaccaccgatcccggctgttcccacccagtaattataggctttctcacctactttttctgcactgttctttgcggtcggtttcagataataccaggtgcttccctgcttcagccagccggttaccatataaccattctcgtctaagtagtattcttttccgtctacagtcttccagcatttctttgcataggtgccatcttcctgtaccagcatccagcggtctccgttcagtacccagtaagcctgcgcctttgtttttgactgatcccatacaccattggcatccacatagctgtttccgatccaggtgtctgtcgccatggctccgcttccattcatgtaataccaggtgcttcccagctgtaaccagccggttaccatagctccattacccggattcagatagtaccagttgtttccaagcttcagccagccggttaccatccagccggctccgtcaaaataataccagcttccgttgatcatttcccagttatttctggtatagcttccgtctgcatgacgataccaccagcggcttccgctctgtatccagccagcctgtgcttttactttccccgggatccaggctccgcttccgtctacataattgtttccgatccaggtatcggttaccatcgctccactggtgttcatgtaataccaggttccaccggtctggatccagcccgttgccatcgctccgcttcctgtcagataataccaggttccggacagttttacccaaccggttaccatccagccggctccgtcaaagtagtaccaggctccgttgatcacttcccatccattggtggtatagcttccgtctgcatgacgataccaccagcggtttccgctctgtatccagccggcctgtgcttttactttccccgggatccaggctccgcttccgtctacataattgtttccgatccaggtatctgcctgcatcattccactttcattcagataataccaggtacttcccagctggatccagcccgttgccatcgctccgctttctgtcagataataccagccgctcgggcgttttaaccagccggttaccatccagccggctccgtcaaagtaataccaggctccattgatcacttcccacccattggtggtatagcttccgtctgcatgacggtaccaccagcggtttccattccggatccactgattgacagccactacagcccgtggctgtacctgtgcctgaggttctgcctctgaagccgcctgttcaccggtctgtgctgtctgcggttctatctgttctctgctcttatctgcagctgttctgttttctgctgcttcggtttcgtctgtctgtacctctgccgcactgtctgctgcatattcctctgcctgttctttgttttctgtttcgttctcctgcccggccacctgggatgcttcctgtgtcactaccggctgcggaacacttgccagtgccccggtcggtgtcagcatggtaactgtaaggcatcctgccagtaatctgcttacgtattttttcttcatatgtacttccttctattgtactttcttctattgtattttcttctatgtctgaagcattgcactcttctcgattatacaagaaacaatgtactggtttctttgccacagcttttattataactttgttacaaatctttgtcaatttctttgcatttttctcagcacttttttcagataattatacagatcaacccgcccttgctgtcattgacaatcttttgcatcgtatcctgcagcttcacctgactttcttcactgatctgagcaatcttggtacggatgccgtcttctaccagctgttcgatggattttccgaaaatattggtctcccacataccatcatcggtatttttttcattttctttgatgaatgtgatcagatcgtgcgcctgttcctcgcttcctacaatcggtgcaatctccgtctcaatattcgctttgatcatatggatggacggactgaccgacttgatcttaacaccgtatttgtttccctgacggatcacaaccggttcttccagtgtgatctcatttttctcggggatcaccacaccataacctgttccacgtacggattcgatggcctgctggacttttgtatattcctgtttcatctgcgccagctctttcagtgtatggatcagctgatactcgctctctatcgtcacaccggtcatctcgctcatcacctgataataataggggtcttcgatctgaatacggacttttaccacaccgttggaaaggttgatttcttccagtgtgactgatttgacatagttactgtccatctccagattttcctgccggatatcacggatatattccatggttcccatcttctctttcatctgtttcaacagatcttctttcagataatgggtaaccggaagcagttccacccattttggtatgtaatattcgatctgacgcaccgggaattcataaagaatcttttccaggatccggagcacatcttcttttcgaagttgttcacagtttaccccgagtaccgctgcctgatatttttcttccagttctcttaccagcttctgtgcctcttctccgtacggctttttcgaattcacaagaatcaaaaatggtttcccctgttttttgagttcctgtactgtcttttcttctccatccacaaaatttttacgcggaatatcaccgaaggaaccgtcgcaggttactacgagaccgatggtagaatgttcctggatcacttttctggttccgatctctgccgcctgatgaaacggaatctcctgttcataccagggggtttttaccattcgttctttttcctgctccatatcccctgtagcttcaggcaccataaatcccacgcagtcgatcagtcggatctttaccggaatctcttctcccagatttacattcaccgcttccctgggaataaatttgggttccactgttgtaattgttcttcctgaaccggaaaccggcagctgatcccgcacctccgcagcatcctgttcttccattcccggaagtgccagaagttccatgaacctccggataaatgtggatttgcccgtccggaccggtcctaccacccccaaaaggaattggcccttcgtacgggcttgtatatctttgtagacagcaaatggctccatatagaaaaatcctcctcacctatactactactcagtatatgtgagaagaattttctctaataccagattttttatttttcacaggaggatggatcctcttgtgccatatttctccgcagctgttccagatactgtttttcttttttactcagtactgcatcttcaagaagttccggacggttctgaagggttcgcaggatagactgctctctcctccacttttcaatattcgcatgatgaccggaaagcagcacatccggtacttttttccccatccattctgccggacggctgtactgcggatattccagaagattgtcatggaaggaatcaaattccgcggattcttcattgttcaacactcccggcacaaaacgggaaattgcatccatcattaccagtgccggaagttccccgcctgtcagtacataatcaccgatggacacataatctgttaccacttcttccagcacacgctcatcgataccttcatagtgcccacacaagaatacaagatcctgttctctggcaaaatcttccaccatcgactgctgaaatacttttccctgcggtgtcagatagatcacacgtggtttgtatccgatggattcggtcacctgtttccatgctccgtagacaggttctgcctgcatcaccatgccggctcctccgccatatggatagtcgtccactttcatatgtttattggttgaaaaatcccggatgttcgttgcagtcagccggatcagtccctgctccatagcccgtcccataatactggttctcataccctgttcgatcatctcgggaaacaatgtaagtacatgataatgcatactctttccttcctgtaatcatacagccgtttgcacagctgctttttatcaacatggatacctgtctgaatctgtcccgtcaaaaagcggtcagatcagaccatccaacaaatgaattttcatttttcctgcttccacatccacatcaaggatgcagtctttgattgccgggatcagaacctctccatgttcttctgtccggatacaatacacatcatttgcccctgtctgcatcacatctgtcagaacaccaaatgctgtaccatcctcaagttctacctgcatatcaatcagatctgcaataaaatactcatctttttttaatttcactgcatgttctctggtcacatacaggctcttccctttatacttttcaatgtcattgatattatcaatgtctttaaatttcagaatcaaaaactgtttgaaaaattttaccccttcgatttccagacttttctgttctcttccggtatccaggatcacctgttttaattttctgaaccgatctggatcgtctgtagtaggaaatacttttacttctccccggatcccgtgagtgctggagattactccaacctgcagcaattgttccatatctctactcctctttgtttcctgtttccaacgatatatgttacccgcggaaatgaatgaaaaaggatatagccattggctatatcctcatattttcagctattgcagaatttcaactacaaccttcttatcacatttagaggaagcagcttttaccacagttcggattgcctttgcgatgcgtccctgacggccaatcaccttgcccatatcggaaggtgccaccttcaattctactaaaatcgcattgctctcttcagtctggtttactaccacttcttccggatggtctacgagggattttgcaattacttctactaaatctttcatcacgcacctccacgtatttgtcaaagcatttccatctcagagaaatgcatcaggcaaaaacgatattactgctcagagcaaatcatgaacagcaacaacataattcagcagcccctggcggttctgcattatttttcgataccggctaatttgaagattttgcttacaacttctgtaggctgagcaccgtttgccagccattttttagctgcttcttcgtctactttgtatacgctcggatcacaagtaggatcgtatgttccgatctcttcgatgaatcttccgtctcttggggatctggaatctgcaacgatgattctatagaaaggtgcttttttctgacccattcttctcagtctgatttttactgccattttaatttcctccttaaggttatccttgtttattatagttttatttgtttatttaaaagggaagcttaaagccgcctcttttaccgcttttaccacccagcatgccaggcatctgtttcatcatctttctggtctgatcaaactgtttaaccatccggttgacttccgcaatatctacacctgcgccctgagcgattcgtttctttctggacgggttcaaaagatccgggttggctctttctttcggagtcatggaaaggatgatggcttcttttctcgccatgtctttctcatcgatcataccctcgatgtcttttgctttgtttcccagtcctggaagcatgttcaatacactggaaataccgcccatgttcttcatctggttcatgctctccagataatcgtcaaagccaaaggttgctttcttgatcttctgttccatctcgcgagctttgtcctcgtcgatgttctgctgagctttttcaatcaagctcatcacatcgcccattcccaggatacgggaagccatacgatccgggtagaactgttcgagatcggaaagtttctctcccatacctacatacagaatcggttttccactgattgctttgatagaaagtgccgcaccgcctcgggtatcaccatccatctttgttaaaatcacgccgtcaatgcccaccttctgattgaaggactctgccacattgactgcatcctgaccggtcatcgcgtcaactaccagaatggtctgatccacattgacttcttctttgatccggatcagttcctgcatcatatcttcatctacatgaagacgaccggcagtatcgaggatcacaacgttaaagttctgattctttgcatgttcaatcgctgctttggcgatgtttaccgggttctgtttatctcccatcgagaaaacttccacaccctgtttttcaccgttgatctgcagctgtgtgattgctgccggacgataaacatcacaggctacaagcaatggctttctgccttttgctttcagctttccggcgatctttgctgtggttgttgtcttacctgcaccctgaaggcctgccatcatgataacagtaatctctcctgccgggcgcaacgcgatctccgtggtctcacttcccatcagagataccagttcatcgtttacgatcttgatcaccatctgccccggattcagtccgttcatcacatcctgaccgatcgcacgttcctgtaccgctttgataaactgttttaccactttaaaactgacatctgcttccagaagtgccatcttaacttcttttaatgctacctttacatctgcctcggtcagacggcctttgcttctcaggtttttgaatacattctgcagtttttcagttaaactttcaaatgccatgtattataactcctctaatatgctgtgggataaagtctcgatccggttcatcacctgattcagatctttttcctcatagtgttgtgtcagtccgtgaatctcatgtaccttctcgcggaccgctacgaacttttctaccagatgcagtttttcttcatattcttccagtattctggtactgcgcttcaccagatcatgaaccccctgccggctgattccctgatcctgcgccacctcgctgagcgaataatcattcaacacaacatcttcgtaaacattctgctgatgctccgtcagcagttcgccataaaaatcatataacaatgcctgtctcgcaagcttatccatgttcatcaccttggacatcatacaacaatctttcatgggtgtcaagtactttttcttgacatcgtcattttatgatgttggaggcaaaaggtattttatttttcttccacaaacacatattttttcagccgtttaaaagcttcctgcactctgctgagtggcagtgccaggtttacgcggatgccgtacggggcaaaaaacgggcgaccgtcctgccatgccacacctacatcccaaccggctttgaggacctcgtcgatggtttttccatgtgtcttacaccattcttcgcagtccaggaacagcatataggttccctgcgggcggcttaatgtgacaccgtgaaagtgttctttgatgaaatcgcaggcataggaaacatttccgctcagtacccggcacagttcatccacccactcatagccttccggtttatatgcaccgatcagcgcatacatggaaagtacattcatcgcattatagtgtgatttactgctggctgccatcacccggtcacgaagataggaattgtaaatgatatgataacttcccaccaggcctgccaggttaaaggttttgctcggcgcatacatcgccacggtgcggtttctcgcatcctcgctgacagactgtgccggcgtatgatgatatccttccaggatcagatccgaccagatctcatcggagataaccacgcagtcattggccttatatacttccatcgctttttcaatctcccagcgttcccatacccggccacacgggttatggggattacagaagactgccacatggatatgatgctctttgatcttcgcatccatatcttcataatccattctccagattccttccgcatcttttttcagcggactgtgaaccatcttatatccataatttccgatacttccggtaaatccgatataagtcgggctatgcagaagcactgcatcccccggacttgcaaatgcctgtaatgtagacagaacaccgccgagtacaccattttcatacccgatcgcctccgcagtcagtccctctacaccgtttcgtttcgtctgccagtcgataatctcctgaaaatactcttcccgcggatcaaaatatccaaatgccgggtgctttactctctccgcaattgcctcctgtacagtcggtactgtcgcaaaattcatatccgccacccacatcggaataatatcaaatccctcttttggtttcgccggacttccctgtccgtcttcactgagaccatctaccgcaatcgcatccataccgtgacgatccatgatcgttgtaaaatcgtatttcatttgtaaaaacctccatgtgtataattactcttattagtaactgctccacaccttcacagttatctttattatatatgttttctgtataaagcacaaatgtaaaagcaggcaggaatactatctgaaactagtttcctgcccgtttttccattactttattgtctgtacattcgtttgtattcaggaaagcttcgggaataacgctttcaccgtcggatagatctgcacaaatttccgatactgtgtctcgtatttttctgcgatctccgaatccggttctacggtttccaccactttcacgatccttgcagccgcctcttccaccgatgcaaaggttccatccgcaactgcagcaagcatcgcaccgccaagggcaggcccttcctcggaagcgatccgttccactttgatattcagtacattggcaatgatcttcctccacagtggactcttcgctccaccgccacagatcctggttctctcgatatgaatccccagagattttgctatctcaaaagaatcacggatcgcaaacgccacgccttccagaaccgcctgtgtcatatccgcacgtgtggtatccatggacatgccgataaaggttcctctcgcctgcggatcattatgcggagagcgttctcccatcagatatggtaagaagaatacatgattttctcccagcttttctatcacttcctgctctttttcgtaatctttcgttccgataatggtatccatccaccatttattgcaggatgccgcactcagcatgcatcccatcagatgataatgtccgtcagcatgggcaaatgcatgcagggcattgtgtggatccacgccgaaattttcactggaaataaaaattgttccgctggttcccagagacacattacactgaccatctcccactgtaccggttcccactgctgccgcagcattatccccggcacccgctgccaccagacaggtttccggcagtcccagctcttttgctacctccggttttaatgtgcccactttttcataactttcaaaaagttccggcatctgttccctgctgacgccacagatttccatcatctgttctgaccagcatttatttttcacatccagcagaagcataccggatgcatcggagtaatcacaacaatgtacaccggtcagacagtatgccagatagtctttcggaagcataattttacaaatcttcgcaaaattttccggctcattttcctttacccacagaagcttcggtgcggtaaatccggcaaatgcgatatttgccgtatattcggacagtttttctttcccaattacctgattcagataatcggtttcttttgtggttcgcccatcgttccacaggatcgccggacggatcacctgatcgttctcatccagaataaccagaccatgcatctgtccgccaaagctgatacctgccacttccgtcgcatcaatcttgctgatcagttccttgattccctcttttgactgttcccaccagtcttccgggttctgttctgaccagcccggatgtggaaaggacagcggatattctctggatacaatattgacaacctgaccttcctgatccatcagcagaagttttaccgcagaggttccaaggtctacgccgatataatatttcatctttttcctcctgtatctattatgtacaagagcgtgttcaaataaatttcaaacacgctctgtcatctgatccatttttattttatgcaaaaggattttctgtcggatatcggtctcccttcggatggttgtatccgatctcatccggtgttacgccgatgtatttgaatacttcaaacagtgcttttccatagtgtccgaatgcaacggctccgtgatgaggatagcctttttcgatcagctcatgacgatagaatcttcccatctccggaatcgcgaagataccgatgccaccgaaagaacgggtagcaaccggaagtacttcaccgtttgccacataagcgcgcagttttccgtcagccgtactctgcagacggaagaatgtaatatctccaggtacgatatctccttccagtgttccctgtgtcacttcttccggaagggatcttgccatgatcagctgatatttcatggagcaggaagtcagttttccggttgtggtattaccacagtggaatcccataaatgtatctttgtgtgtataattatattttcctttgatttcactttcatacatatctgcaggtacggtattgttgatatccagcagggttaccgcatcgttacttaccattgttccgataaattcactcagtgcgccatagatatccacctcacaggataccgggatgcctcttccggtcagacggctgttcacatagcacggaacaaaaccgaactgcgtctggaacgccggccagcattttcctgcgatggcaacgtattttctggatcctttgtgtgcttcgatccagtcaaggagagtcagttcatactgtgccagttttggaagaatggttggtttgttgtttccatcccccagttctttttccatatctgcaaccactgccgggattctttcgtctccgtcatgtttgtggaatgcttcgaacagatccagttcggagttttcttcgatctccacacccaggttgaacaactgtttgatcggtgcattacaagccataaagtcctgcggacgcggaccgaaagtgataattttcagatctttcagaccaacaacggctcttgcaatcggaacaaactcttccatcatctcagcgacttcttccggtgttcctaccggatattccgggatatatgctttcagattgcgaagctgcaggttatagcttgcgttcagcataccacagtatgcatccccacgtccctgtaccagattgtctccgtgttcttctgctgctgcaaccaccaaacacggtccgtcaaaatattttaccagaagagtctctgcggtctccggaccgaagtttccaagatagacaaccaaagcattacatcctgcttcctgcacctctttcagggctttctgcatatccagctcactctctactacggttggacattcgtacagttctcccttataagctgctgccactgcttttcttcttgactcggacagtgtgatcgggaagcaatctctgcttactgccacgatacctaattttacttccggcatgttcatcatgatcttattcctccttgattttctgcaagttcatcttatttgtttacttactaaactaatcacactgtaccacttgttatatcttccgtcaagatgcttttttagtttacttttttcaatttgtttacttatcaaacaaattgtggtatggtaaatagcagttaaacaaaaaatatttttacaggaggtgtgtgcatggtcacaggaagcagagaactgatccgggagatgaaccggcggcttgttctggaaaccgttatcaacgatggccccctttcccgggcggctatatcaaaaaaactgggacttaccaaagcaacaatctctgccatcgtacaggatctgctggaggaacaatatatcgaagagatcggaagcgatcagacacagtacggccgtaaaccgatcctgttacaattctgccgtcagaacggttatattatcgctctggatctcggtgtggaacgtaccgtgctgatggtctgtgatctgcttggacaaaactgtcggcttcaccagtataactgcccgttggaacgggatacttcgattgatttcttgttgcagctcatccggaatcagatccgtcttcttcccgccaccccctttggtgttgtgggaataggtatcggtatccacggtaccgtctgccggaatgaaatcaccttcactccaaattataaccttgcagaccttcccatcaaagatacgctggaggacgctctggagattccggtatggctggaaaatgaagcaaatctttccgcccttgccgaaaaaacctttgtggaaaatcataaaaatctgatccatgtcagtattcatgcaggtgtcggtgcggggattattctggatcatcatctgtatacaggactggccggtacagccggagaggccggtcatatgatcgtccagcccggcggtcgttcctgtccctgcggcaatcacggctgtctcgaacaatatatatccgaaccggcagttctctcccgttaccgggagttatccggccgcaccacggtctcaatcgacgatctggtctgggcctataaccagaaagaaactgctgctctggctgtgacggatgaatttaccacctatcttgcctgcggaatcaacaacctctggaaccttttctctccggaatgtatcatcctgaactgtcagctgaccgcttatctccctcagctgctcccggagattttgcagaaactttccccgcggttccgcgccacctgccatctgaaactttctacacttcaggatacaggagtacttctcggtgcggcaaaagtctgtatcagcaaatacctgggaaccgaaaaactgtatttttccggattacaatccataacacaccatttgacccgttgctcgcgtaatgaaaagaaccgatagttttttgaaaatacagaaaactatcggttcttttcattacatccatttacaggatgcccttttatccctgccagtttccggaatatttgatatacgcatccgaacaaactctctgcacatcctggagtaccgcagaggcagcttcctttgttccatagataccagccgtgataacataccatttctcagtattcagattgctccagtccgtagtcacaaacacctgcgcatcaaaaccgtttccccgtattttcttcttcctgatattcctctttcttttctttcattgtttcctttctgaacaggaattataatcatcctatttatttttcacattacaaacccgaattcttaactattttgagcattcgggtttgtatttttttacaatacactggttttctaaaatttctataaaaatacgacacatcccccaaaacgtatcttgactttcctcaccatttttcctatactgctttttgcaacccttttaccctgattttctgataaggatatttatattatgtttgaaatttttgttgactccgctgcaaatattccggcggaacttgtgaagaaatttaagattaaagtgctttcttttgtaaacctcgtaaatggtaaagaagtgacctgttttgatccgaatcttacgccagaggaggagcgtcagaaaggaaaagattattatgatatggttcgtgccggtgcggatatcaagaccggactgatcagcagtggtgtctttgaagatgcgttccgggaggctctggaggcggataaagatgtgctttatttttctctcagtaaaaatatcagtggaaactataattccgcaagaatcgctgccgaagatctgatggaatccggtaattataccagaaagatccgtatgatcgactccctcaacgcttccctggcacagggaatcctcgcgatctatgccagtgagatgcgtgaaaaaggcatggcttttgatgaagtggctgacatcctggaaacctgcccggcaaaaatgaacggtgtcttcaccgtcggtgatctcaaatacctggcaagaaccggacgcctgagtggaactgctgcagtcatcggtaatgtattgagcatcaaaccgatcctgcgcggaaacaaagacggctacatcgtccagtataaaaaatgccgtggtcgcaaatccgccctgaacgagctgatctccctcgtctgcaataacatcgtggaaccggaaaaacagatcatcggaatcgcccacgcagacgcttacgaagactccctgtacgtcatggaagaaatccagaaacacatcaaagtccgtggcttcatcaacacctcctacgacttctgcaccggcagccacgtaggccccgacaccatcgccatgttctttatgggcaacgaccgcgaattacagggcatgaaataatttcttaaattaatcatcataaatccaaaatgacagatagtattccagaacatccgttttaaaatactacctgtcattttttaatccagtcaataacttccaattgcatccaccccttctccctcagccaatacccagcccgaaagcagactgcgccgtttgctgcaacactttgtgggcggttaggggaagctttgagatccagcacctacgtagactttcgcgagggtccgctgaccctcgtgaatatagtcgaagttggtgattagctcaaagttcccctgcccacgttgcagcaaacagcgcagtctgctttcgggcgtccccgtattggctcacccttctatattttacagattcgtccgaatcaatttcggccgatatccatctttttccagttcctgcataatctgctgcttatgctccgtaccaaacgcttccatagtaatcttaagctccacagctgcatttctgtttgtactatagaactggttatgatccagtttaataatattaccctgctgctctgcaatcttctgagaaacctttgtaagttcacccggacgatccggcaacagaacagaaatcgtaaagatacggtctctctggatcagacccagctgaacaacagatgccatcgtgatcacatccatattcccgccactcagaacagaaaccacttttttacccttgacattcaggtgtttcagtgctgccacagtaagcagaccggagttttctacgatcatcttgtgattttctaccatatccaggaaacttacgatcagttcatcatcttctactgtgatcacatcatccagattcttctgcagatacgggaatacatgctcaccgggagtttttaccgcagtaccgtctgcaatcgtattgaccgtaggaagcgtggtaacttctcccttatccagagaaacctgcagacaatttgctcctgccggttccacaccgatcactttgatgttcgggttcagcagttttgccagtgtggaaacaccggtagccagtccgccaccgccgatgggaaccagaatataatcaaccagaggaagctctttgatgatctccatagcgatggttccctgtccggttgctactgccggatcatcgaagggatggataaatgtatatccatgttcttctgccagctcataagcatgtgcgcatgcatcatcgtagacatctccatacaggacaacttccgcaccgtagctttttgttctctcgactttgatcagtggtgttgtggtcggcataacgatgacagcctttgcaccgtatgcttttgccgcataagccacaccctgcgcatgattacctgcggaagcggtgatcagaccttttgctctctcttcttctgtcagtgtactgatcttatagtacgcacctcttaacttgtacgcaccggttctctgcatattttccggtttaaaatatactttatttcctgtcatctgactgaaataatcactgaaaatcaattttgtatcctgggttactctttttacaacctctgaagcctcttcaaatttgtcaatggtaagcattatgattcttcctcctctgttttcacatcaaacagtgcatttacaaactgttctgcattgaatttctgcagatcatcgatggattctcccacaccgatatattttaccggaatatccagctcggactggatggctacggcgatgccgccttttgcagttccgtccagttttgtaagaatgataccggtgacgtttgccacctctttgaactgtctcgcctgtgccagtgcattctgtccggtcgtaccatccagaacaaccagtgtctccagataagcatccgggtattctctctccagcacacggtaaatctttcgaagttcttccatcagattctttttattatgaagacgtcctgcagtatcacagagcagtacatctgcatttctcgctttagctgctgctacggcatcgtacacgattgctgccggatctgcaccggcctgtcccccgatcagatccacaccggcacgatgcgcccactctgtcagctgctctcctgcggctgcgcggtatgtatccgctgctgccacgatgactttcttgccctgatccttcagttttcctgccagttttccgacagaagtagtttttcccacaccgttgacacctatcaccagcacaacagattttctgttttcaaattcataggcagtatcacccacatccatctgacgtttgatctcatcgatcagaagctgtttacattccgaaggttctttgatcttcttttcttccacttcttccttcagatgctcaataatagatgttgtggtattgataccaatatcccccatcacaagaatctcttctatttcttcatagaaatcatcatcgatactggaaaagccgctgaaaatagagtcaattccggccacgatattatttctcgtttttgtcagaccctcccggagacgtctgaaaaaacctttcttttcctctgacatatggtttcctctcttactctcaactttttcatcattttttctctgtcactttactgtacgacttcattataaaatgatgtatatactactgcaagtctttttttgatttacagataattcctactcgtccagctgattctcgatcaggttgaccgataccagcgtggaaacacctttttcctgcatggtgataccgtagaggcggtctgccgcgttcattgtaccccggcgatgggtgatcacaataaactgtgtgttttttgtaagtttgtgcagatactgtgcaaaacgggtaacgttggaatcatccagtgccgcctcgatctcatccagcagacagaagggtgacggtttcaggttctgtatggcaaaaagcagtgcaatggctgtcagtgccttttccccaccggataactgcatcatattctgcagcttctttcccggtggctgagagatgatcctgataccggcttccagtacatcctcatcttccatcagctccagagtaccctttccgcccccgaaaagctgtttgaatactttatcgaattccacgcggatctcctggaacttttctgtaaactgtttacgcattccctcatccagttctgcaatgattcctttcagtgtctctgctgcctccaccagatcggtatgctgtgcgcttaagaacgtgtgacgttccagaatctctttatattcctcaatcgcattgacattgacattacccagttttcggatcgcatcttttaattctgcgatctgctgccggatcacactgcgctccggcatgtcttccatccgataggtattcgcctgtcccggtgtgacctcatactcttcccagagataattaatctggttatcctgccgttcttccagtttttctttctggctgttcagtcggaaacattctttgtccatccggctgatatgtgcagacagttcatcccggcggctgaagaatgtcttatgctgactgttcagttcttctttcttttccagatactgctgcatctgcgcctcgtcttcctcacggattcggctggcttcctgaattgttttctgaatagacagaatattgtgttctttttcttctttttccttgccaccctcttccagagattcttgcatctgttgcagttcatctctcattgccgcttcttcctgatggatacggctgagattttctcctgtaaagctcactttctgttccagcgaagcataagccacctggatctggttcagttcctgactgtaagaagcttcctgttcctgcaatttttccagaattttctgctgactgttcaccagtgcttcctgttcctgctctctggctgtggaatgtttcatttcttcccggatggatgaactgctttccttgatctctgcaatctgtccttcaatctcgcgtccctctgcttttaactgtccatagccgatccgcacttcacggatgcgtgcctctgcctgggtgattcccaccttttctgtattctgactgatctgcagctgctgtaactgcctggtcatctctgccaggtcatcccgcagtgtatttctacgctcccgtttatccaggaagattttctgtatcttttgcagctcttctttcagtgctgccacttttccttccagttcctctatttcccgacgacgtcccaaaagattgctgctgtttcggaacgctccaccggtcatggaaccgccgggacttaaggattctccctctaacgtaacaatccgcaaggtatggcggtattttcttgcaatgacgatggcgtgatcaatggtatccaccaccagtgtccttccaagaagctgtgacagcagagttcgatacgtactttcggcagttaccagcgtatcggcgagcccgatcacaccttcttctttcagtgctgcgggattctggaaactgctgcttcgcatattggtcagtggcagaaacgttgcccggccataccggtttttcttcagatattcgatcatgaccttcgcggtctgttcgttatccgtaacgatattctggatacttccgcccagagctgtttccaccgctgtttcatatgctttctctaccttgatcaggtctgcaacaacaccgtggatccccggctggcgatccttctgttccataacacgccggatactgttgccatatccttcataacgttctgcaatatttcgcagggactccagacgggatgcctccctgtgataggctgtctgtccctgttccagtttcttattctgttcctccatctggcttcgcagagagccgacttcccgctccactttccggtattccatctgtataccatccatctgagcgccgatctctttgcatttttcctgatgttcctgaatgatctcctgctgctgtgactcatcgctttttagtttcaggacacgctggctgagagccgctttccgtataccgatctgttcaagcatcgcatcataacgctgcatcttacctttggtggatgcccgctgattcaggatctcgatgatttcactcttaccatcctctatgctctgatttgtttcttctatattctgatgcagaatcgccagtttttcttctgcttctttttttctgacagctgcttcgcccaggctttctttcagggcttcctgttcctgttgatgtccggctgcttcctgctgtcggcggtcaagttcctgacggatcgtctggatacgttcttcgtagtgctgatgattctgctgggctgcgcggatctgttcttttaacagttccacactgttttccagctgctgctttttcagggcattctcgctcgcctgagttctcgcttcctgaatcttcgtatccagttcttccagttccttttccagacgttcatactctgcttttgtctgatcaaactgtgtctgcgtctgttgcagctcattctgagaaatctgatatttttcttctgtttcttttaactgttctttgatatgagcactctccgccagatacatgttcacatccaggatcttcagttcttctttcttcttcagatagactctggccgtttctgactgtcgttccagaggacccagctgcctggtaagttccgacagaatgtctgtcacacgaaccaggttctgctgttcctcatccagtttctttaatgcagttgcttttctccgtttgaactttacaatccctgctgcctcgtcgaaaagttctcttctttcttccggttttccgctcaggatcttatcgatctgaccctgaccgataatggaatatccttctttaccgataccggtatcgtaaaacagttcgttgatatctttcagtcggcagccggttccatttaacaggtactcgctttctccggaacgatacagtcgtctggtgacagtcacctcttcatactcgatgtccagtttgtgatcggaattatccagagtaatggctaccgatgcaaatcccagcggttttctggtctctgtaccggaaaaaatgacatcctgcatatttccgccacgcagctgttttgcactctgttcacccagtacccagcggacagcatcaccaacgttgctctttccactgccgttagggcctacaatgccggtgataccgttatggaattcaaatacgatcttattggcaaaggatttgaatccctgtacttcgatactctttaaatacatacgtcacctactgtttctgtttgttgtccgtggctttcagtctgcagatcgcacggtatgctgccatctgttctgcagctttcttggttcttccgcttccctgtcccatgcactgctcaccgatccatacttccacggaaaaggtcttgtcatgatccggtccgctctcacccagcggatggtaggaaatctctcccgggatatttccctgtaccatctcctggaagatagtcttgctatcaaaaaagagttttttgtgttccatatcatttaacacatatttcagtacgaactcttttgcattagcaaatccaccatccagataaaccgcaccgattacagactccagtgcatccgaagttacagaatctctgtgacgtccacctgtcatttcttctcctttccccagacgaagaaagcttcccagttcaatttctctggcgcaaaatgccagtgtcggctcgcataccaggcttgcacgcagtctggtcagttctccctccggcatctgtggaaactgtgcaaataaatgttcactgcttaccagttccagcactgcatctcctaaaaactccagccgttcattacattcgatccggttcatcttatgttcattggcataggagctgtgacgcaatgccttttccagaagttccggattctgaaaatgatatcctatccttttttccagttcctttaattctctcatattttctcccgattttatttttcacatatcaccttcggtgattgtatattgccctgtgactgtttcctgttctgtcagagaacagtttactccacaactctctgaatcagatctatcgcatccgccaccgtcacgattttttctgcttcttcctgtggaatctcaatatcaaaagcatcctctactcccagaataatctgatacagatccagagaatctgctcccagatcctcggtaaaggtggtccccggcatcacttccgaagcatccacattcagtacttccgcaattatctgctgtaatttttccagttccatctctaattatcccccttattatcctgcttcatattctcctgaatctttccgcagatatcttcttttgaaaatgtaatacactgaattagtgaatttttgatctcattggctttcgaacttccgtgagccttgactaccagccctttcaaaccaagcagaggtgctccaccgtactcgctggcatcaaaacttttgagtgtttcttttaatgccggttttaccagaagagctccgatcttactgcgcagagtgctcatcatccctgcttttaccttggaaatcaaagtggctcctacaccctcgtacagtttcaggattacatttcccacgaatgcctcacagactacgacatcacagactcctttcggaatatctctggcttccacatttccgataaagttaatgtctttgcactcttttaacaacggataggtttccttcaccagcgcattccctttttcttcttctgcaccgatattgaccagacctaccttcgggtttctcactcccatcacatattccatataaatagaacccatgcgtgcaaactgtacaagatgagaagaacgggcatccacattggcaccacagtcgatcagcagggaaacaccggttgctgtcggaatcagtggagccagaggagcgcgttccacgcctttgctttttcctaccaggacctgtccgcctaccagtacagctcctgtactgccacaggatacaaaagctgaagcttctttacttcttaccattcgcagtgcctttaccagagaggagtctttctttttctgaatagcgtgtaccggcggttctccggtttcaatgatctcagatgcatgaacaacttccagacgttctttcggatacgtatatttatccagttcttttttcagaacatcctcctgacctaccagatatacatacagttcaggcttctcccgcagtgcttcgaccactccttttaccggttcctgtggtgcataatcgccacccatagcgtccacggccactttaatatattcgctcatatttcatcctcttttcccataaacctgtcatatctctgttcctttttctcatggaacaagtaacgtataactatctatatgatactagacattgtgtaaaaaagcaatgaaaatgtacataaaagggacttgcctttcctgacaagtcccctgtttttcctgttataagatttccttttctgctactgcatcacaccgtcagatcccagatgataaccgtctacatccgtatcatgtgccattgcaccgttttcctggaaataataccacttatctccttcctgataccaaccggtacggatatatccgttctcgtcaaatacataccactgaccgtcaatttcctgccagcaactggttggataagttccgtccgcattctgataccaccagtttccatcggtctgctgccagcttccggaagctacctcttctgtagtctcttctgtagtctcttctgcagtctcttcctgtgtatccccggtttcttccggtgctgcttcctgctcagtgatagtaacacatttggttccgctggctgtcagctgaactccgtcacctaccgtattggttactactacataatagtaaattgttccggactcagtggtcggcggtgtataggttgcttctgttgcaccgtcaatagctgttccacctccattggaatccacattgttccgataccactgatagcttaacgttccttcggatactgtggcttccacagtcagcgcatctgcagtcgcatgcagatcgtacgtaaccggatctcccatctcagaagtgatctgtggtttttccacactgtcatctatatttgctgcattcagatccacagtaacttcctctttttttgtgtcttcactgttatttcctaccaggataccgattgtatcttttgctgagcaggcagccataagcggcatacaacagagtgctatgcctgcaagcaatcccctttttaatctcatattatctactccttttattttgaaattgttacaatttcttttcattcctgtgttgtattgtaacattttcataattatatgtcaactgaaaggcttcccctcttccttacagctgagcagttacaaaaatgtcgtagatcgcacggatcgcagtctcaaaatcacggttttccacaccgatgataatattcagttcactggatccctgatcgatcatctttacattgacatgattatgtgccagtgctgaaaagattcttcctgctgtacctctgtttcttcgcatacctcttccaacgaccgcgatcaatgccagatctgcttccagatcgatggcatccggcgctaccgcacggtgaagacctgagataatgttctgttccttttcttcgaattcactctgatgtacatacacagtcagtgtgtcaatgccggaaggcatatgttcaaaggacagcccgttatcctcaaatacctgaagaacttttctgccaaatccgatttcagagttcatcatatctttctcgatattaatagaagcaaatccttttcttcccgcaatacctgtgatcgtataggccggtttgtagcaggtgctttccacaataaccgtacctttatcctgtgggcggttggtgttgcggatattgatcgggataccttcctgacgaagcgggaaaatagcatcttcgtgcagtacagtggctcccatataagccagttcccggagttctttgtatgtaattgtctcaatgacggccggattgtctacgatacgcggatctgttaccagcataccggaaacatcggtccagttttcatacagatctgcatggatcgcttttgcaacgatagatcccgttacatcagaacctccacgggaaaatgtcttcacacttccatcatggagagatccataaaatcccgggattactgcatgatcgattccttccagtctttctgccagctttttataagtcatctcatcgtccagatttccgttatcttcaaagaaaatacattctgcaggatccacaaatgtgtaacccagataatttgccatcacgataccgttcaggaattctcctctggatgctgcatagtcacttcctgcctgcgcaatgaagtttttctcaatctctacaaactgttcatccagtttcagatccagtcccagtccgtcaataatttcctggtatctcgcctggatttttttgatctttcctgcaatcttttcacctttttcagctgcccgataacattcatagagcatgtcggttactttgatatctccatcaaaacgctttcccggtgctgacggaaccacataacgtctggattcatctgaacggatgatatcacctacttttttaaactgttccgcactggcaagagagctgccaccaaacttcactacttttttcatgttttcctcctctgtgcataactgtacatatgcggtttttcattttctcctattatagatttctcattttcatatgtcaataataatgtcttgctccggatagcacaaaaatcatgctctcgcatgatttttgtataaaaacgatatactgactggtttatttatccatctcaccctcacggtatttttcaatctgctcatagttgcttgcaagagcacccgttccgcttgcaccctttggtccgaaacgaaatacaaatttcagaaggattggcgttatgatagtcgtgatcacaactgcaataaccacaggtcccaggaaggaagatcccatcagtccgagagccgatcctttatcagcaacgatcagtgcaacctcacctcgggagatcataccgacaccgatacgggcacactggtaattcttatatccacacacttttgcgcccagtccgcagcccagcactttcgtcagtactgcgacgattaccagaacaaccgtaaatcccacaacttttccgttcatagccggaagtacaactttgataccgatacttgcaaaaaacagcggtgaaagaagcatataagaaatcgtgtcgaatttggatgccagccactgtgttctctgtgtcttggatactaccagacctgccacgaaagcacctgtgatatctgccacaccgaagaatacttctgcgcaatatgacaacaacagacagaatacaaataccatgattgcatggcgatgcagtggtctgtttgtcagttcttcccattttttgtaaccataatagaatgccacacctgcaatcagcgcaaatgcaaagaaacctacgatttttaacagtaccataccgaggcttacggaagagtctgccatactggtaacaattgtcagtgcaataatacccagaatgtcatcgataattgcggctcccaggatcgcattaccggaatgagtttttaattttcccatctctttcagcgtttccacactgatacttacagacgtagccgtcaggataacaccgataaaaatattctgtaaaaacacactggctcccgcatcagaatcgataattccgggcttgttaaagaaatatgccacaacaaacccgcctgccagaggtaccagaacacccagcaatgcgatcacaaacgaggcttttccgctcttctttaactcgtcgatatccgtctccatacctgcacagaacatcagaaccacaactccgatctccgcagcatcatgaataaaagtggtctcatggagaatattaagacaggccggtcccatcaggagacctgccagcaatgcccctaccacctgtggcatattgtaacgacgtgttaccagtccgaggatcttcgtagtaagcaggatcaatgccagatccagtaaaaaattgtacgttgtttccatgttttttcctccctgtgttttgcggttcccatcttcaggtcagaaccgcactgttgcctactatagcatttttacaccggaaagacaatatttttatctgaaaattttaatatttatcttaccgctcaatggaggttttccagttctttcattcgttttctccggcgcagacgttcaccgcttttattatatacaaagaacgattccaccagcagtttattaaagggacccagcttgtctttggttgttttatcgtaccgggttccgccacaggtaatataggaaacactttttacatatttgatcagatccgattcacagcggatattatccggcagtttagtgtacgccattccgatgcattccagtctgtgggcatcgcttcccccaaatccgggtttatgatactttctggccagttttctggccttttcgttcacttcttctgattcgcaggcattgaaaacttccacaaagtcgaactgttccatcagacttttcagacgttcttcgtgaaacttctttctcgcctgggttttgatcagactgagatatttctctccgtatggatgcgccggtccgacaattcctccgtacttgtgtaccaccatgatcagaatctgagccggcagaccgcgcagttcaagaagtttcagtttcactccctccggcatgatcaccagcatatgtccacagtcgatcgtatcatattccacaccctttaacaccacgaaatctgtatgattctttcctttgatggaatctctccattcccggtaaccgtcataagagttgtgatcggataccagcatcccgccgaatcctttttctttcagttttttgatatattcttcgatcatgacttttccatccatggaaccttccttggtatggcaatgcatatcgaacttcatataccctcaccccttttcgtacagttttcataacgacttgtctttttgcgctttcgcagatagtcattactattttctttacagatattataacctttttccgacacggttacaaattataattgtaaaatttataataactattcaatagtcactgtaccgcgaggtgttttggcatgaatatgccaaactcctgagacatacaagccaaaatgtatgcgatcaccacaagttcgcatggtttcttcatttccgcatcgggttaatatgccgtcctgcagcgatcaggagaagagcggaacagcccagctgtaccagaatcgacagttctaccatatgctccaccccaaaagaatggctgtaatctccaaaataatcacacagccgtaccagtccgtaggcgttggttgtctgctgtccgatcagtccatacagcgtgactgccggattaaaatacagaagataaaccagcccgccaagccggatgcctgtaaagccttcctggtacattccccgcatctgctgaatatagccggttccaaacaggatacccatcgttccgaacaccagaagtaccactgtcacataacttaaaatcaccgcaaccgtagttttgcgtatgatcgccgaataaaagatagcgatacttcctataaatataccggtgatgacaagattcaggatcagctgaaacagatttaccagagtaattcctccatagatcagcaccagtcctattacaggaagtgttgaaaaggaaataaggaaaatcaggcagagagaagattccagttttcccagaataattttccagggactcagatgggtggtgagaagcagatccagggtctttctctcacgttcccccgcaatggcacctcctgccagtcccgggatcagtatacagatggcaaggaacagaccatatcccatcaggacataacactggatcggaaaacggtactgcaggatcgtcatataattttctcttccgctcaatcccatctgtgcgatcagggcaaacaatgccagaaccagattcacaccaagaataatccaggcacatttcatatttcttgtgtaacgtttcatttcattttccagaaccggattcttcctcatactgttgttcctccctgtgccagatctgtaagatggaaaaatacagattccagactattatgttctctgcggaaagaagttaccagcaccttctgctccaccagttgtctcaaaagctgtgcctcttcttccctgcttccggtaaaaagaatggaaatcatatttttatcgattgctattctggataccagcgggtgccggttcagcagatgaacggcagtctccagattctgatatacctcgatcaggatcggattggaactgtcgatagaggtcatgatttcatcgatgggaccttccagtaccattttcccctgatggataactccgatattgctgcacatatctgccagatcagacagaatatgcgaactgatcagcaccgtatatccctcttcacacagactccgcaagacttctttaaagatcctccttgcacccggatccagtccggatgccggctcgtccatcaccagaagctgtggccggtgaatcatggcacgggcaagacagagtctttgctgcattcctctggataattcatctaccatacgttcttcaatatgaaacagctgtaccctttccagtacctccgaagcccttaagcgcccttctttttcatcgatcccataggcagccgaataaaattccagatattccattaccgtcagattatcataaacaccgaaaaaatccggcacatagccaatcttgctttttaagacgcgagtctccttttctgcccggataccatcgatccagactttccctgaagtcggccgcagtaatccggatatgattcggatcgtggtcgtttttccggcaccgtttggtcctacaaacccatacagctgtccatgcccgatttccatattcagtccgtccaacgccgttacgtgaggatatcttctggtcagactttcaatcttaagcatccggattcaccacctttcctgtgatctgcagacagggaagtgtacagtttttatttgtaacatccatatcgtccgccacctgataacgaacccgcaatgtcccctctgccgacagatatttttccagttccgtcccgtcaaacaatttttcccattttgaaatcgtctcatattctccactggaccagcaataaaaagcaacctgcccacgaaatggttcaaaatatttcggatcatcatattccggtttaaagaattttatctctgtaatttctcccagtccggaaagatcatagttaaggactgcatcctgtccgtacatcagattcgttcccgcggtcgcgcttccactttccacagaagccagcacttctgcgttgggacagaatatggttccctcttccttttgccagctgatatccaccggcatataaaactgtgagattccgtctacttcataaccggaattcatctcaaaagaagtatcactgttggaaatcgttccgaggaggcagacgccttccgtttcttttctctgtgcatcccatacctgttccatcacggcgttcaccgcataatccggatactctgcatctttcagatccagatattttctcagaatcttttccagacctccatttccataggaatggattttttcggaaaaagtaccttcttctcccggttccaaatctcccagaaatacgatacggttcgtgagtacaagaatcgcattctcgattctgtatcctgtagggttcttccatctgacttcgatatgctcattgtccccggatgcatggatctgtatttcttcttccggtgataccgcatgatcccggttcaagaaaaatgcattgcctgcaaacaccggcagcctgctgaatgtcagtttgtagcagtcttctttttcgtagatttccactttatccgtgatatctgtattgacctcttctacactgtatccgctttctgaagacattgtcagatgataacttttatccagatagagctgatatgtactgttatatggtgcctgtacacccagctgcatcgtttctccccagatatgatcctgctgggtatacatccgtttcatggtaagtaccggagcagtcagtctggtgcttgtccccatcactgccataataccaaggaaaagaacggaaagcagtgtaactcctgaccagaaatattttctttttccctgtcttttcaggatcaggtacagtcccggtcctgccacacaggcataaaaaagaatcagtataaaatatttgatcagactggggcgttttcgtaccggaatctgactggtgtcatagccggtagatacaacatagccccatttttcactgatcctgtcaaaaaatgttgatcgtgtttctccattcagaaaattctgaaatatttcaaaaaaatcctgcccggcttcagcggtaagcaggatacccccttcctgctgccatcgatggagtgtcacccactgttctccggaaatcgcagcctccgatttgatcagcagtgcatccagttgacccagatctttccagctgtccggaatctccgatgcatccatctgataaacagacacaaaaatatctcccatgccttcggtagtatccgcagaaatctgtatcccgtcaagctgttgcacatcttccggctgcgctcctataactccgatcagtgcaatgttctggtttgcagaaaagttcttactcagtgattctgtctgtactgttcgggatccatctttcagatacgcctgtacggtaccgttggcccatggaaatgtcagataaaacgtttcctgccgtgtttcccctgcagcgagtgctatatttttcttccatacgcacactttgcttctggtatagtccatatcattgccgatcatcgtcaggctctctcccagatcagattcctgacttccggcaaccggcacttccatctccagctgtccttcaaacgcttccccatgatttgtcagtgttgccgtaaccggcaggcaggcatcgctatttccctccttgccgttaaatccccagtttaatgttatctcaatatcgttctccggctcatcttctgcccataccatgcagggcagcagtaagatcagcagtaccagtactattccccggatatattttctcatgtctgtctctcctttgtctgttgcaacggaagccatacagaaaataccgttccgtcaagatcacttttcacctgtacgtctccgccatgaagcactgcgatctgatgaacgatagccagcccaagaccggttcctcccgtattctgtgaacgcgactgttccacccggtaaaacttctgaaataatttttccagatcttctttcgggatcacatacccatagttgatcacctgtaccagaacatgttcatgtaccacttttgctgccacacggatgatttttccgtcttttccatatttgaccgcattattcagaagattttcaaaaaggcgtgccagcagattgccgtccccctccatgggaatcccatgttccacgcagctgaactgggcttccagaccgtttttttcaaaacttggccacgcttcatccaacaactgttccagtagtttctgcagatccagttgctccagatgcagactcatctccttatgttccatcttcacaaagccaaaaagttcgttcgtcagctgttccagatgcaatgctttccggtatgcaatatccagatactgttgtctggtctgttcatccagatcaggtctgctcttcacccagtccagataacctatcaccgatgtcagcggtgtacgcagatcgtgagccacacttgtcaccagatcatttttggtacgttccgattcccgttccctctccatcagatcctttacatggcgttccatctggttcatatacctggcaatttctccgaattcgtccagattctctacgggaatctcctgatccagatttccgtttgcaatatctcgcatggcacgttccagcatccgcacataactcatatatttgtggatcagggcgtaaaaagtaaacaaaaaagtaagtgctccgcaaaccccgagaatcatcaggcgataaccgggatacagcccgtccggccccagcatggcacttcgatatcccatataacgcagctttcctgccactttgtagatcagaaacgccatcacaacttccgcgattccggtagctgccaggctgatgatcgtataccatgcgattcttccttcgaatgtctgaatccatctactgctcaattttatatccaaccccccagactgtcgtaatgatcttatcggttctggtatcatccttcatcttgccacgaagccgacggatatgtaccataacggtattattggcctcatataccttctcattccatactttttcaaaaatctcgtcagtactgaacacccgacccggatgagaagccagaagatacagaatgtcaaattcgattggcgtaagcttaatactctctccatccacaaatacctgatgtgtttccttgataatagtcacatgattcagacggatcgtgctgtcctcagcctctttcttttcattcgccggattcagatcccggtaacgccgaagctgtgacttcactcttgccatcagctccagagggttgaagggttttgtcacataatcatccgcccccgtcgtaagccccacgatcttatctaactcctgtgtctttgcgctgaccatgataatcggcacgttatgcttctcccgtatcttcctgcacatctcaagcccatccatcttcggcatcataatatccagcaacaccagatcaatcttctcacgttccataatcgcaagtccctcaagagcatcctcactcttaattacctgatacccgtcactgatcagatacagttccagcagatccgcaatttcctgctcatcatccacaactaaaattctggtttcttccatcttatatttcctccatgtccccttatgtatttctcagaatccaactttaaaatgtaactcttctacagttcatctcacaggctctctcctgccagacagttacttccgtctccttttttctgtactccatcgggcattcgttcacccattcccctacagtgtaccaccatccactcaacaaagtccttaccaaaaacttaaaatctcacaaacctttcccagacagaaccaccaaactccgcccccaccggcaagcaccactgccaagaatcagtttctgcccacgtgctaaaatacgcttcgcgaattttacttattatcgcggcagtcgccaagttctcgtgcaagcacggactttggctcattgctcacataaatagaacagcggctgacctgtgattccttgggtgaacaacactttgtgggcgtttagggcaagctttgaaatccgacacttacggagactttcgcttgggtcagctgacccaagtgaatatagtcgcagttagtggccggtacagcgttttcaaaataactataccatacacttgtctacgaatccgattgcacaggtctaaaagcctcagcgtagcccgctacgcctacgtttttaaacctgcacactcgaatccgtatcctgcgtgtatggtatagttatttatgaaacgctgtactagttcaaagttgccctgcccacgttgttcacccaaggaatcacaggtcagccgcgtccccttagccgaaacctatatctgtattttatttgtaactgttcagtaccttcacagttacaagccaaaatgcatttaaaatcaccttcggtgatggcattttggcttgtatgtctcgggattttggcatattcatgccaaaacacctcgcggtacagtgactactgaatagttacttttattttacttattttcattcttgccgcaaagataatcaataaactgctgtgccgtcctgcccgacagtccaccatgctgcaattcccacttattggcctcaagcagaagttcctcctccggcatctccacctgatgtctttctgcaagcgtcttcacgatattctggaactgctttttatccggcgcgcagaagaaaatcgacacaccaaatcttgcaaccagagacagtttctcctgaacagtatcggaagaatgcagatcatctcttctctcttctttatccgagaatttctcccgaaccagatgtcttcgattagaggtcgcatagatcagaatattatccggttttttctccagaccgccctcgatcacagccttcagatacttatattcgatttcaaattcttcgaaagacagatcatccatatagataataaacttgtaattccggtttttcacctgtgcgataatatcattcagatccttgaactggtgtttgtacgcctctataatacgaagtccctgatcataatactgattcaggatacccttgatgcttgaagattttcctgtaccggcatcaccaaacagcagacagttattggccggccgcccctgtacaaatgcctctgtattatcgatcagttttttcttggcaatctcatagccgaccaggtcgtccagatgcacatgggcaatattggtaatcggcacgatccgggcaggagtcaccgttccgtcgatacgaaatgccttgtgaagtcccagtttaccaacaccgaattctttataaaactgtaccatatcatccatgaattcttccgtggactctgcttttgccagtttctgcgccagtgtacagatccggtcacggatccgtttattaaagaccttgctgccttcattgatattctgataatcggtgatcagactgctgtccaccgacggataaatcttctccagttctttcagatcaaaatcatacaactgtttaaagatttcaaagtcatgcatcgcgaatgcattaatagtgccttccaccggacctacgatctcacaggccgtactgaacgcattttcatgattgaccagcagataggtcagataatcatgccacaggtttcccgcaaacccgtaggttcctgccatctctaccagctgatgaatacatgcaaaatactccccgtcctttccgtagagtaccttcggatgagagatatcttccatcagcatggtcatcttctccagcaattctccctgttcaaaatcacgatataaaatgcattctcttattcctgtcattgttcttacctgtctttcttacttctcaatatgtaattacttattccggctgttccctgtcttcgcagccggacagtttcatatatcattaataatttccaagaatccgcagattgttcacctctctggaaataccatacagcgcattcttcacaccgctgtcactcagatttccttcaaagtcaacaaagaaacgatattcccactttttctccggaatcggacgggattcgatctttgtcatattcagatcattatagataaaatgggacagtgtgttatacagacttccactctcatgtggaatctcaaaacatacactgatttttcctgcttcttcctgataaatctcttctttggatacgataataaaccgtgtggaattctgccgactggagaatacatgcggttttaaaatctgaagtccgaaacactgtgccgcatatgggctggcaattgccgcctgagtcagatctctgtcttcttttactttctttgctgccattgcggtgttcagatactcttccgctttccattccggatgctgctccagaaactttctgcactgagacagtgcctgcggatgagaatacacggtcttgatatcttccagtgtggcatttttcagacccatcagagcatgatccacctgaatgatctgttcacccacgatgctgtgatggtattccaccagaagatcataaatatcagcaacgataccggcagtagaattctcgattggcagtaccgcgtaatccgcatctccgtttttgatcgcttccatggcatcccgccaggtttccacattgtaattttcaatggattccccgaaaaagctatgcatcgcagtaaaactgtatgctccttcgacaccctgaaatactactttggccttctgcatcggcaaagaagaaactttccggaacggaatcttttctgctttgcctttttctgccagtatccggtactgcagtttccggctcatcgccatcatctgccggaacagctcgtagacacctacacggttaaaggagttggatgcatacttttccagtgtattcagtttttctttttcccgctgtggatccagtactgctttattgttggaaatcttatattccgccacctctgcactcagctgcatccgtttttcaaaaagttctacgatttctttatcaataccatcaatctgatctctgatctcgagtaaatccaatactttattatccattttttcttttcctattccaaattttcacttaattttgtcagatcaccgataaaagacagcgaaccgaatgccacgatcacatcctcttttccggccagcttcatgccaagctgcagggcttcctccagagaatctgccacatatacctgtttcggtgtcttatatctgcaaagaacctctcccagctctttggcgggaagtgcccggggattatccggggtttccatcgcaatgatctcccttgccatcggtgccattctttctgcaatggcttcatactgtttgtcccgaaaaactcccatcaggaaaacaaactccctgttcggaaaatacattcttaaagattcctgcagttttctggccgcgtccggattatgtgcaccatctactaccagataagggtcttttttcagaatggtaaatcgaccattccatcgtgctttttccataccacttcggatctgctccccggaaatctgataccctgtatcctgcagagcccgaatacccgccagtgcaagcactgcattttccagctgatgtgaaccggccagatgaatggtataggtctctttcagataacggaataccatgtggtcaagatctgctgttacaagctctgcttctgttttatccccaacatacagcgggcatcccagcttcttactttcccgttcgatgacatccatcgcctctttttcctgtctgcaggtgacaacacggctgccgggtttgataataccggctttctgaccggcgatttctcccagcgtattccccagatactccatatgatccatactgatggatgtgatcaccgccagttttgtatttctgatcacattcgttgcatctgtctttccgcccatgccacactccagcaggacaaaatcacagctcttttccttataatatagaaaagaaatggcagtctcaatctcaaaaggagacggcagcggcttatgctcttcttccagttccccgatagctttcaccacgggatccatcagtcgcccaaaagcttcttcttcgatatatactccgttgatctggatcctttcccggtattcatacagtgtgggggagataaatctgccgatccggtaacctgcttcctgaaggactgctgcaagatacgcaccaacactgcctttcccattggttccggcgatatggataaactgcagagtttcctgtggattccccagtttttccagcaggcaggttattgcttccagtcccatttcaccgccgaaccgatgactttcatctatatatgttcttgcttttatataatccataaaatatggaacctcctattgcgagtaaactgttgttattatagtacaaacgacaccatttgacaaggaacagttattcctgaaaatccgacaaaatcctttatttttctcttgcaatccaaaagtatttattatatgatgttaggcagagtaaaaatcgatggtactctttatagttttataacatacaaggaggtatatgatgagacatctgatgagtcctctggatctctccgttgaggagcttgagcatctgctggatctggcaaatgacattgaacaaaaccctgaaaaatacgcacacgcctgtgatggtaaaaagattgctactttgttctatgaaccaagtacccgtactcgtctcagtttcgaagctgccatgatgaatcttggtggaaaagctcttggtttttcttccgccgattccagttccgcttccaaaggtgaaagcgtttctgataccattcgcgttgtttcctgttttgcagacatctgtgccatgcgtcatccaaaagagggtgccccgctggtcgcttctttggcttctaaaattcccgtgatcaatgccggtgacggcggacatcaacatcctactcagacattaactgatttattaacgattcgttctcttaagggacggctggataacattacgattggtctttgcggcgatctgaagtttggacgtaccgtacactctctgatcgaagctctggttcgttatccaaatgtaaaattcgtcctgatctctccggaagagctccgtatcccggactatatccgtgaagatgtgctgaaagccagtggtcatgagtttgaggaagtaacccgtctcgaagacgcactgccaaaactggatgttctttacatgacacgtgtacagaaagaacgtttcttcaatgaagatgattatgttcgtatgaaggacttctatattctggacaaggaaaaaatgaaacttgccggaccggatatgctggttctgcatccactgcctcgtgtcaatgaaatctccacagaagtagattctgacccaagagctgcatattttaaacaggtacagtacggcgtctatgtccgtatggcactgatcctgactttactggaggtaaaagtatgttaaatgtaggacgtatcgaagagggatttgttctggaccacatcaaagccggcaaatccatgacaatttatcatgatctgaaacttgacaagctggactgctgtgttgccatcatcaaaaacgcccgcagcaacaaaatgggaaaaaaagatatcatcaaagtagaatgcagcgtagatatgctggatcttgatattctcggatttatcgatcacaacatcactgtgaacgtgattcagaacggcaagattacctcaaagaaagaactgcatcttccgtctcaggtagtcaacgtaatccgttgcaaaaaccctcgctgtatcacttctatcgaacaggaactggatcaggtatttatcctgaccgatccgggaaaagaagtataccgttgcaaatactgtgaagaaaaatacagaggacaccgtaataaataaaaatgaggaccgtgatgactgtggaacattcaaacacagagaatactactgcacttcgtatctattattgcggaagggagcaatgtgctcccggacacttttgggggccggctatccgcccccattatttgcttcacgttgttttgcatggaaaaggggaattcttctatcaggagaaaaagtatgagctttctgccggcgatgcctttttaatcgaaccgatgcagacccattattatcaggcagacaaagaagatccctgggaatatgcttgggttggattcgacggaagctgcgtggaagaggttctctcctccacaattttccaatcttcccctgtctttaccacggactctgctctgtgtattcagcccatgatccggctgaatgccctgttttttgctcccgaaaagaatccactgggactggcatctgcttttctccggctgctctcctgtatgacccgtctggacacttccggtcgaaatgatcacaatgaacagtattatcagcaggcactggaatatatcagcaataattactcctataatcttaagattcaggatatagcagattatatcggcgtggacagaacttatctttacaaaatttttatgcgggaagcgcagatttctccgaaacagtatctccttcaataccggatccgtgcggcagcaaaacttttacagacacaaaattataacgtgacagagattgcttattcctgtggcttccgtgattccgctgctttctgctatcattttcgacagcagatcggcatgacaccaagacagtaccgtgaaaagatacgaaatggtacttattaagcaagtatcaacccggatccgcttgttgttcgcgtaaaaagatgaaaggaatcgggagtcagaataatctgactcccgattcctttcatcttttcttttatcctattcttttatcatagctgtgtggtctattctatttttccttcacacccatccggttaatctgtgttgcaatataaccggcaccatatccattgtcgatatttaccgtagcaatcccgttggcgcaggaattgatcatcgtgagcagcgcggatattccattcatactggcaccatatcccacggaagtaggtacggcgatcaccggtttattcaccagaccacccagcacgcttgccagtgcgccttccatccctgccactgcaaccacgcagtttgcatcctggatcgcatccagccttgcaaaaagacgatggataccggccacacccacatcatagatccgttctacttttgctccgaaatattctgccgtctgtgcggcttcttccgctaccgggatatcagctgttcccgctgtacatacagcaatcaggccgacaccctctttcttttctttattctctattttcaggatatgcgagatcggatcgtactggatctgcggataaatttctttcagcatctggtactgatgctcggatgctctggttccaaatacctctccattcgcttcatataaccgttttacgatcggcaccagatgcgcatctgcctttccactgcaaaagatcacttccggaaaaccggaacggatctgtcggtgcatatccagtttggcatatcccatctcatcaaaaggagctttccgaaaatagtgttctgcttcttcaacagaaatctcaccctgttttactttttccaatacttctctcatatccatctctttgttcaccttgttttcctgctcaatcttcctttgtgatacgttctgttttccctgtttattcaggcaaacaccagtctcatgacctggtctactgtttctaccggaacgatctccagtttttctttcacttcttctgctacttcttccagatctctctcattttctgcgggaataaatacttttttgatacctgcccgctgagctgccatcagtttttcaggaagaccaccgattggcatcacaccacccctcaaagatacctcaccggtcatggcatattccggattcaccggtgtatctgtcaccagcgaagtcagtgccgtcaccagtgtgatacctgcggaaggaccgtcttttggaactgcaccggacgggacgtggatatgcagatcattttctttaaataaatcagctttgtccggatgacgttttttcaccagtgtgatcgcaatctgtgctgattctttcatcacatctcccagctgtccggtgatcgtgatttttccggaacctttggtaaaagaagtctcgataaacagaatctctccaccggcgcttgtccatgcaagtccggtcatcacacccggctgtggatgtttcaggatcgtatcatggatgatccccgatcccaggaattcctgtacccgtttttcattgacagtaatacttttttgctctccccggaccagtttgaccgcggcattcctgcagatcacatccacctgcttctttaatccacgcacacctgactctgcggtatattccgcaattattttctccagggcaccatccgtaaccttcaggttctgtgccttgattcccatcgctttcatcgctttcggaagcagatgtcttcttgcgatatgaaacttctccagtggtgtatatcccggaaactgaatcacttccatacgatttaacagcggttccggaatcgtatccgtactgtttgccgtacatacaaaaaatacatttgacagatcatagggcacattcatgtagtgatccgtaaagctgtagttctgttccggatccagcacttccagaagggcacttgccggatctccgccgtaatcttttgccagtttatccacttcgtccagcaccataacaggattctgagccttacttcgtttcataccttccataatccggccaggcattgcacctacgtacgttcttctgtgaccacggatctctgcctcatcccggatgcctccaaggctgattcttacatattcccggtgcagtgcccttgcgatactctgaccgatactggttttaccggtacccggagcacccacaaacagcaaaatagaacctgactgttttttattcagtgccatcacagcaagctgttgaatgatacgttctttcactttcttcagaccgtaatgatcttcatccagaatctcctctgcttcctgcagattgatctccgactgttcttttgttttccaggaaagtgaagttacaaaatccaggtagtcatacagcataccatattcatgactgtcttttccttcctgtttcatccggttcaaaactttctcagcctctttcctggcttcttcattcatgccggactgtgcaatctttgtttcaaatttacgtacatccgatatattctccggatgcatctcatccagctgctgttgcagcagttcgatctgttttttaatcgcagattcccggtatgcctgttcatgaatctctttctgtgcttcttcagcttcttcgcctacatggaatatctccataaattcataaacagcttcctcaatttttttgcatcgttctcttctggaatctgtctctatgataccatatttctcttcccatgtgatattaaaataagaagaaagtgcacatcctatttcttctacattcttccagtgcaaaatcaccccacgggcccagactccccatgggaatcctttgacgaaacgaaggatatcctgtttcatcttttcaaacaatgctttctcttcttctttcggaaaatcatctacatccggaagaatcgaagcatctgccgtgatcacaccatcttttcccatctcagtatcagaaatctgtacccgttctctcactttgacacgtacatttccttcttcatctacgctgtcgatggtgccaatcacaccaatgggataaaaatcatccggtgtcatctgctccttttcttctttttccattataaataatatatcttctccaacagattctgctgttatctctccactgggaaacacatcttttttaaagaaaaatgtcacacctggcagtaacaacaggtcagaaatcggcaatgtaatcattatgtttcctccttgttcttcttttgttagcactcagtctttacgagtgctgatttttcatcttctattctatcacgttattttgaaaatgcaagtaaaatacgtaaaaaaagaaaagcaacccgaaccttgtattctgatcacttttcttctttttgctgtaatatatatcaacccttggttacgtgaaccgttttgctgatacatttgctgtgtttctacctattataatagcaactcaaaaactatgtttttgtcaggtgaagcggcgaatcgcaaggattgtcttgcaacttgcacttctgtcatgggtgatgccccattttgttcctttcgcttccacgattccgccatttccgtcgtagatagccacatgtccggaataacagatcacatcgcctgcttttgcttcagataaacttgaaactgctgtaccaaggcttctccatcctgctgatgtggtataaccaccactgtaagcaccggtgtttttcagcacctgatatacaaaatgagagcaatcaataccattggtcagggaattaccaccccatacgtatggattaccgacaaactgatctgcatatgctacgatagaactgccggatgctccactgctgtttacggaaccggaactgcctgtcgaactgtttttgtctgaactgctgcctgaacttgcagtactgttattggtgcttgtactgccggaacttgcagtactgctacctgttgctgcattactgttatttgttgtactgttgtttctgctgctctgtgaagccgaactgttgccggaagaagtacttgtcgagcttgctgctgctgtctgctgacggctggcttcttcggctgctgcctgctgtcttgctgcttcttctgccgctgcctgctgacgggctgcttcctcagccgccgcctgtcttgccgcttcttcttcagcctgtcgtttttcttctgcaatctgatccagctgcgcctgttgctggctgatcagattactgatctcatttgcctgctgctgggctgttgcaatctgggcttcgtaatcactgctggttgctttcttttcatccatctgtgcctgtaagtctgcctgctggctctgcagatctgcctgctgactttccagggatgctttctgtgtctccaggtcactcttttgtgtctccagatccgctttctgattctccagatctgccttcagatcggacacctgctgtaccacttctttaaaagcttccagctgttttctgtcataatcgtgcatgttctgtgcatattccactttattcagaagagacgtgatactgtccgcaccgcttaacatattcagccatgcttcatttccaccattctcatatatgtactggatacgttttttcatatccgcatactgcttatcgcgatctgcctctgcatcctgcagctgaccggcagttgtctcaatctctccctctttttccgtaatatctgcttctttttgtgcaattccatcttctgtacttgcaatgtctgttttggtagcatcaatctgaatcatcagatctaccatatctgcatccatagcattgatttctgactggatctgctgctgctgttcagacaaagaagcaatggtatcatttgtctgacttaactggctctctgcctgggctttctgctgtctgatatctgattctgtatccgcaaaaaccgtaaaagactgagaaaccatcattacaagtcccaaaaacgcacatactactctttttttcatgtataacctctctttttattacctttgttgctttgttttttaatgactttgtaacaatttcgttactttttatatactaccactttcccggagcaaatgcaagaagtatgtctcataattcgcagaatattcacagaatggctattgttcacttcattcccagtaactcgcttcgcgatgcacagaattttcatcaaaaaagagaaccggatcttttccccggttctctttttattgattatcctttattcacagccttttttgcttaatcaatcaggttctgcatgctcttcagtcctataaccagcgtagaagtattatgcagcaatgcggaagtggttggctgtatgataccggtcacaccaagagcgatcagtccggcattaatcaaaataatcgaacgatagttcttgtggatccgtttcatcagcccgttactgattgcttttaatgtaacaatttcgtaaagattatccgcaccgattgttacatctgctatttcacgggcaatctccgcaccgtcactgatagcgattcccacatctgcagctgacagagccggtgaatcattgataccgtcaccgatcatgatcacttttcgtcctgctgctttttcacgttccacaaatcccgctttatcttccggcaatacttccgaataatattcatctacaccaatctgtgctgctacagctcttgcggtacgttcgctgtctccggtcatcataactactttgctgattcccgcccgtttcagagaattgatcaccgggaacgcttcctgacggatcggatcatggatacagatcaccgcagccagttttccgtcaatagccagatacagatgggaatactcttccggaagtactgcgaatttttcttccatgccgtccggaatcacacaatgttcatcttcgaagacaaaatgagcacttccgatgattactttatgttcatctatcattgtggatatcccatgtgcaacaatgtattctactttagaatgcatctcttcgtgggaaatattccgctttttggcggcatcaaccacagccttcgccatagaatgtggaaaatgttcttccaggcaggctgcgatacgaagcagttcttcttcggagcgctcacaaaaggtctctattttagcaactgttggttctgctttcgtcagtgtaccggtcttatcaaatacgatggtatcggcctgtgcgatcgcttccaggaatttgccaccttttaccgtgatatcatacagacttgcttcccggatcgccgaaagtacgctgatcggcatcgccagtttcagcgcacaggaaaaatctaccatcagtaccgccagtgtctttgtcatatttcgtgtaagcagataggtcaggccggtacccgccagtgtatacggaaccagacggtctgccagatgttcagcttttccttccacgttggacttgagtttttcggactcttcgatcatggtaacgatcttctcaaacttacttccaccgttgacttccttgacacagatggtcagttcgccctcttcgaccacggttccggcatatgcatatttctgtgcattcttctgaactggaaccgattctccggtaagtgatgcctggttgaccatagcatctccggctgttaccacaccgtcaaaaggaatcacattgcccatatgaacaacgatctcatctcctgtccggatctgatctgacggaaccagaatctcctgtccgtctttcatcaaccatactctggatacgtgcaatgacatgcttcttgccagatcatccacagattttttatgggtccactcttccagaatctctccgattcccagaagaaacatggtggatcctgcggtctcaaagtctccgcggaaaatggatacaccaatcgcagttgcatccagaaccgggacttccagtttccctttagcaatcgtccgtactccatgccacagatatttcaccgatttgactgcagtgatcacggaacgaacagataccggaagaaacattttgcttcccatacgcataaccactttattgaccagtttttcccagtactcattctgcagttcccggccggaatttttcagataagtctccggtactttggctgtctcataatggaaaacttttagtgcccggattacttcttcccggtctcccacaaaattaattgtggcatcctgtgttttctcacggactttcactcctgtcaccagtttctggctgctcagataataaagtaacgtatccgcctgctcaaatgtcatatgattctgaagaagatgaacacgcatacgtcccctgatttcatgtttgattataaatttcattgaataacactgtccttgtgtaagttttgaacttggggcacgcccaacttattcttctgtaaaatcttctgctgtctcttttgtctcttctgtttcttcatcttctacaacagctgcttttgcttcacgttcttcgttgatctgctgtgcttccgcataaatatcttctgcattttcctgaacagatgttaccactttcattacacaggatttcgcgcgcagaactgctgctgtgcagtttgcatagaatttttttgcatcatcactggcaagaattttgattcctgcagtgccaaacagtacaccacctgcgaaaatacctgttttttttgcgtcgaaattttttaaaatgtttgccataatattctctcctttgtgtatgaaaattttgtttaccaattattatatcgccttagaaataatcttcaagttatttcttctttaatgatattttttctcaattaatcccgttttgccggatcatttgctgctatgcaatataacaaagcaatcccagacacgctctaggaggcctgtccgggattgttcgtgtattttacaattctttttccagtcatataaccacagctttccagtccacaggtcagtacctgacggaactttctgtcagaaagctgaagcaccgtgccgtcatccagttccattctgcaacagggaacacattctaattcttcgtcaatatcactgccggtatatttatacatgtttttccggttgatcactccgatttcttctaatgtattcaccatgcggtacacggttgcggctccgatactggaatcttgtttgcaggctttgtaataaatctccttgcaacaagagcagtcctcatccagaataatatcaaggatgatgcgccgctgccgggtgatccggcagccacgctctcttaattttgaaattatgatactctttggctctttctgcaattaatgtcaacacctccaaatagtacctttaatggctgcaatgtcctccgcaatgtgcacagtcaccaccgcactgcagtgatttgccgttctttttatcttttaccatgctgcggacgatgagtgctaccacaccaaccagaaccgcgccaacaactactgttcccatgcaaaggtctcctttcttaaagtcagatcagacttttcttacgcaactttcaatgatttactttctttataaggtctgaacagcatgtacaggaatgcaatcagcagtacaaccgcaactactgtccacagtccgaatccaccaccggtaaacagggtaccaaactgatagatacacagggatacgatataagcaagaccacactgatatccgatagcgaaccagaaccattttgcattattcatctcacgtttgatagctcccattgctgcgaagcatggtgcacataacaggttgaataccaggaatccgtaggctgcgatcggagtcataacctgtgccagattaccccagatctcagaaccatcttctgcaacttctgcaaaaccgaacagcataccgaaggtagctactacgttttcttttgcgatcagaccggtgattgcagcgactgccatcttccatccttcaccggcttttgtccagcccagaggagcaaagatcggagcgatcacgttaccgatggatgccagaatactgtcattcaactgttctgcatccagcataccgaattttccgtctacccagccgaagctcatcaggaaccacagaatgatggtagataacagaataattgtaccagcttttttaataaatgaccagccacgttcccacatacttctcagtacattgccaacggttggcatatggtaagccggcagctccataacgaacggagcaggttctccggaaaacatttttgttttctttaagataataccggagcagatgatcgctgcaacacctacgaagtaagcactccatgctacccatcctgcgttattaaagaatgcacctgcgatcagggcgatgatcggcagttttgctccacaaggaacaaaggttgttgtcatgattgtcatcttacggtctctgtcgctctcgatggtacgggatgccatgataccaggaacaccacaaccggaaccgatcagcatcgggatgaaagattttccggaaagaccaaatttacggaagatacggtccatgatgaatgctacacgggccatgtatccacagccttccaagaatgccaggaagataaacagtaccagcatctgcggtacgaaaccaagtacagcaccaacaccggctacgataccatcaaggatcagtccctgtaaccagtcagcacagttaacagctaccagcgctttctcaattgccggaggaatgatatcaccgaacagaacatcgttggtccagtctgtcaggaatccacctactgttgtaatagatacatagtaaacaataaacataactactgcgaagattggcagtgccagccaacggttagttacgatacggtcgatcttatcggatacggtcattccgcccttctgaccttttgttacgcattttccgataatagaggagatatatacatatctttcatttgtgataatactttcggtatcatcatcgaatgcatcttccagagttttgatctcagcggatacatccggaacagatttcatctgttctttgatcttgtcgtccttctccagaagtttgatcgcaaagaatctcttctgggcttccgggatatccatgccaagcatggttcctacagctgtgatcgcatcttccactttactgtcgaactcatgtaccggtgtaacttcgttctttctctctgcaagactgattgctttctcagctgctttctggattccggtacctttcagtgcggatatttccacaacctcgcatcctaacagtttgctcagtttgtcagtatgtatcttgtcacccgctttttctaccaggtccatcatgttgacagccataacaaccggaatacccagttccatgatctgtgtggacagatacaggttacgttcgatgttggtaccatctacgatgttgatgatcgcatctggtctttcattgatcagatagtttctggctacgacttcttccagagtgtatggagacagggaatagatacccggtaagtccatgatggtcacatctttatgaccttttaacttaccttcttttttctccaccgttacgcccggccagttacctacaaactgattggaaccggtcagcgcattaaacaatgttgtcttaccgcagttaggattacctgctaatgcaattttcactgacatttttctgctcctttttcttatttgttgaaatgctgttttacatttctactaatttttggtctgtgctatcttttattagttttcgctaacgcacaggcaaaaaaattattcaacctcaatcatttcggcatcggctttacgaagagataattcataccctcttacggttacttccaccggatcacctaacggtgcaactttgcgtacatatacacttacgcctttggtgatacccatgtccatgattcttctttttacagggccttcaccatgcaatctctttactgtgactgtctgtccaacagcaatctctttcagagttttcataacattctccctctttccttgataatccgcctgcttacaccatgatacggtttgccatatcttttccgatggccacacgtgaatctttcacattcacgatcaggtttccctcgatttcagatacgaccgtaacctctcctccagttacaaatccaagattctcaaggaattttcttgtttcttcttttccaccaacctttttgattgtgttagtttctcctggttttaccatagataacggcatcatatcaacctcttttctttattgctaacatattaatgttgttccttactggcgttagtatatgctaatattcattagatgtcaagtacttgttggaaatttttttcaataagtattttcacagtaacattattcacacttttgcccatggaaaaaacatgtttgtcagttgaatttttgtaatagttatgctatactaatctatacttgatggtaactgttcagtgttttgtatcacagatacgatcttctggacagctgcttttcttttagtcatttttagtggaattgttcatgaagggggtttgtaatatggcaaaaaatgaatcagcagaaaattatctggagacgattctgatactgagtaaaaaacttcctgttgttcgttccgtagatatcgccactgaattaggttataaaaaatccagtgtaagtgtggcaatgaagcacctgagagaacatcagcatatcacagtcactgatgccggattcatatatcttaccgaatccgggaaagagattgcagacatgatttatgagcggcacgagctgctctcttcctggctgatgcatctgggggtaccggaagagatcgcaacagaagatgcctgcaagatggagcacgtgatcagtaaggagagttttgaggctattaagaagcacgtgggtgcactgtcgtaagtgttgagaaatcgaaatttagaagtcgaccttttattttttaaggttggcttcttttttagtttgtttgttcctatacggacgcaagaggaaggcggagccagggtgacacgacgtgggcagggcaactttaagctagccgctaacttcggctatagttcacgagggtcagctgaccctcgcgaaagcctacgtaagcgtcggatcttaaagcttgccctaaccgcccacaaagtgtcgtgccaccctggctccgccttcctcttgctgggtttcggcactatttttctatcgcctgcttcacactttcaaacacatcctgaaacgccgcaccactctccttgcagagccgaaccaccgattcatactcaggataaacttttttcataccatctttctcacagatcttcacttccgcctccccgtaaggtgtctgtaccgtctttttacttctccgaagcaccgtccggtccatcttctgtctgcggatcccaatggtcgttgtttcccggaagatgatattttccagtttttctctgtcttcttccatgcagatcacattcagctgccacccagggcggtttttcttcatgtatacaggggtgtaatgcacatctcttgcaccggcttccatcagtgcaccgagaacatagccaagctgttcaccggtactgtcgtcgatgttggcttccagtttacagatcttatcttcctgtttctcttccgtctcgatcagcatcgcgcgaaggatacccggacactcgtatttgcgttttccggcgccgattcccacattgaggatgcggaatgtctccggaagtgtttcttctgtgcggactgctgccgcaaaagctgctccggtcggagttaccagttctccttccacctgtgtcatcctgagtttcagaccgctgtcctggataatattggtaactgccggaaccggaaccggaaggatgccatgctggcagcgcacggttccctttccctcacaaagaaacggaacgattacaccatccacctgcaaactgtccatacagaccgcagctgcaacaatatccacgatagaatccacggctcccacctcatgaaaatgcacctgatcttccggtacattgtgtgccttcgcctccgctttcgccagaatccggaaaatatcttttgccagttctttcgccgtatccgtcatatcacaccggtcaatgatcgggaaaatatctcccagtccgcgatgttcgtgatgatgatggtgatgctcctcatgtccagtttcttcctgcgcatgcatcgcttccgcctgcaccggatcatgatgatgcccggctgtttctgcgtgatcctggtgatgctcatggccgtgatgatggtcatgcgtatggccgtgtccgtgaagatactccatatcatgatcgtgattttcatgctccgcatccagttttaccaggaaatcccaggcatcgatcccggactttttcacctgctttaattcataagaaaatccttccaccggcatatgatccaacacacaaaacagcggtgtccggtctttcataagaccggacagtgccgcaactgtcatatctccgctgattcccgaataacattccaaatataatttctgtcccatttccctgtttcccctgcctgatttcttttacttttaaaacgctcccgatgaacaaacttcgtttgttctggctctcttgcgctcattatttcgtgatttcatcactccataatttcgccgttcgtcaagagtgagcaagctccctctgactctcttgcgctcattatatcatgaactaatatatttctgtattcttaatttctgtattctctgtgttttccgctattccatcatattctcaataaaaattccatatccttttgtcggatcattgacaaacacatgggttatcgctccgatcagtttcccgttctgcagtacaggggaaccgctcattccctggacaattccaccggttcgggagagaagatcatcatccgtgattcgcaggacaaaacatttattggtatctcttgcattgctgtcgatctcaagaatctcacactgatattcccggattccatcaccgatatcacagcggatctccgcttttcctgtctgaatctcctgtttgagtcctgtcggtatctttttcatggattctgtatattttccgggttccatctgcccacggataccatactgagaattcccacatatcgttccgatccggttttcttctctgtaattgatcacgccccgaagttcccccggtgtaccggctgtacctttacggatagaaagaatatctgcacggtaaagatcaccgtcagaaatttccagtctttctcccgtgtctgcgtcactgattccatgaccaagtgctccaaatgttccgttcggctccacatacgtaagtgttccgatcccctgaatattatcccttacccagataccaagtttataggaaccgtcttcagtctccaccggtgtcatctccagctttatcgtctcctggtggcggatcacctgcagttccatcggttctccctgattctctcttaccagctgcatcagctgccttttccctgtaagtactttcccatcgatctcacagatataatctcccgactggataatatgttctgccggtgtcctgcggattccttcccgatccgtgatctcaccactgtcaatcacaagaacacctttcgtctccatatagatccccacaggcgatccactgaccagcacttcctgcttttccaccgtatgaaccttaatggttttcagcggcagcactcccagccatttgcagcgaatctgataacttccattttgtgaaacttccaccgtttcatcgtaagaaatcagtggttcctgaaaaaatgtttcccagtccgtctcttcgtctgcgtagacaaatatttcatccggtatgtgatccttcatagttccatatattaatataaacaggctcagcagcgtccccaccagagcgtaccacaaaaattttcgatattttttctgtttttcctgcaagtttccgccacatcctttcgttttgtcttctccgttagtatgtgacaaaccatttatttcacacttgcagttttttgttgtttttcattatttatccagcagctttgagaattcttccgcagacattggtttataataatagtatccctgcagataatcacagccgtggttacataagaactcactttgctgtttattttcaattccctctgctacaaccttcattcccattcgatgtgccatatcgataattgatattacaattgcatctctctttggatcctttccgatttttttaacaaaccccatatccattttcaatgcatcgaaggtgtaatcccgtacagtctcaaatgtagaaattccggttccaaaatcatccagaaaaatctgaacgccctcttttctcagacgtttcagaaattcttctccctctttgctgataattgtgtatgcggattctataatttcataacggaaatattgttttggtacttttgtttcctgaagctctgtacagatccgctccatcaaccggctgttcatcagatccatacgggaaagattgaccgctaccggaatcattcgtttccctttgtgatagcgttcttcctgaaacctgcggaccgtctgatctatataggtatccagttttgtaatataaccactttcttccagttccggcacaaaaacggacgggatcatcggctcttcgcctgaactgttccaacgaaccagtgcttctgccgatacaatctgtcctgttttcccctccactaccggttgataacataccacaaactcttcctgttccaatgccttttccagattcagaagtgccaggttcttctgttcgtattctgtcttcatatcttcctgatagatcgcatatggctgcacatattgattggaaattttatttttggccatttttgccagatcgcacatctgcgaaacatccagcttgcattgcttgggaatatagtaaataccacagcgtccgtatatttccacctgttcttccccgattttcacctgatactgcagaagttttcccagtgccgcaggttccagattttttgcatcgacaagtgcctgaaaacgatctgcagccacacgccccagtgccagtggacggagcgtactgttctggatccggtccatataagagcggatgattctatcaccgttttcgtatccatagacatcattcagaccggaaaacttgcggatattaaaataaataatcgcaaattgataccggtctgcattcttttttaaaatattttctgtctttctgacaaatccgtcacggttcagataatcggtaagcggatctttttccatttccactgtccggtcttccactgcgatcagcacttcccgatattctttatccagccactggtaggtatatcgttccaccccgcggtcagcattgtacactgtaaaagaatatatccctgccacctgcagattttcttccatagtattcagactggcagaggttcgaaaccattctctgctcttttcctgtatacatttttcactgagttcacggatgaatccttcatactccagcggactgtcacatgggatttccgtgttctcaaacgtatgttttcggacaaatactgtattttcctgaatatccaatacagcgatcatccggtatttatccctgagcaacatatgagtcattacacgattaatataaggaatcgtatcatttcgccagattgcgcaacattcaacagtgtgatccaccggatgttcgaacatctctatattaacggtataacaggtaatgtattttccttttcgaaaacgatatccaagttgtatgtgcctctgccccgtctggaaaatacgcaatagttcctctttcaaaaatgttctgcgaaatttcttctcttcctcattatccagaatatagggataaatctgtttttgcagccagtacgtcacgccgcccggacgtcctgtctcatcctcccagcaggctttttccgggtttttcacttcccggacaatattgtcggtaatattaatataaaacccatattgatccccgtcttcacctgtcatcagtcgctggatccgcttttcatatggtgtttcttttaaggatccctccatggtattccacctgccttttgtttcttttgtttcttctttttcttatatctcttcctttttctttcgtgccagttctttcatctcttttgcactttccatcgtgtgttccgtaatctgcgcaccaccaagaatccttgcgatctctaacgctgaatcttcctcattcaacagacggatctgtgttcttgttatctgatggtctgtctttttcgcaatctcaaaatgctcatctgccatcgctgcgatctgcggaagatgggtaatacagatcacctgatgatttcttccgatcactgccatcttctccgacactttctgcgccgttcttccgctgataccggtatcgatctcatcgaagatcaatgtctccgtctcatccttatccgcaagaatcgtcttgattgccagcataatacgggaaagttcaccaccggataccactttcgccagtggtcgcagtggttctccgggattcgtggaaatagtaaaacagattttgtcatttccgtttgccgtgtaatgctctgttgtttcaaaatcaatctcaaatttcacatccagaaaattcagatcctgcaagccctgaataatccggccttccagctgtttcccataaactttacgcagttcggacagttcttcacagacagatgccagttctgtctccgccttctgcatctctttttccagtttttctttatactgctcaaaatgatacagtcggtccagatctttttgtttttcttcctgacatgccagaatctcttctaccgtagaaccgtattttgccttcatgcggttaagcagattcagtctctgctccgtctcatagaattcttcttcagaaaatgtcatgctttccacataatcactgacttcccggttcacatctgacagcagactttccacatcctgtaacagactggcaatctgttgcagagattcatccactcccagcatccggtttgtctcctgtaccgcccggcccaccagatcctgtgcaccgttatcatttcccgtataccctttgacggctgccatggcttccagaatatttctgcccgatgacatttttttatactgtttttccagttcttcgtcctcgcccggacgaagcccggcttcctctatctcctgaagttcaaattccaggaaagaaatctcccgttttctggtttcctcatccagctgataggaagtcagttccttctttttctgactccagatctgaaaacgctcccggacttcctgttttttctcccggatctcttcttttccgtaggcgtccaaaattattaactgctgatcctgatataacagagactgatgctcatgctgtccgtgtatatccaaaagaagagaagatatctcccggatctgggcagccgtacatacttcaccgtttaacctgctgatactccggttcccggtaagttttctggatataataatctgcccttcttccacagagatttccttctctttcaatcgatccacacatcttggattgtctacctgaaaaatcagttccaccagcgcaggcttttcttcatcgcgcagcatctctctggacattttctgtcccagcgcaaggtttacggaacccatcaggatggatttgccggctcctgtttcaccggtaagaatatttaatcccggcccgaattctacttctgcttcatcaatgagagccaggttttttacatgtaaatatgttagcattctgctccttttccctaacttttgtctattttcggtaactatcgggttatttcccactgcatagttacattctgttactgaaaattatatctatacaatcatttttcgaatcttttccatcagtaccaggccttcatccacacttcgtgccacgcacatcagtgtattgtctcctgcgatactgcccacgatctcaggaatctgcatctcatccagtgcagctgccgcagccatcgccataccggatacggtctttaccaccagaatattctgtgccagatccatggactggaacgaagtacgcagcacatcggtatattttctgctcatttcctgatccacgctctgcagcaccgcatagcgggaacctccgcccggttttgatattttcgtcagtttcaactcccggatatctctggatactgtagcctgagtaacctgaaatccactttcattcaatttctctgccagctcttcctgggtctcgatgtcatactgactgatcagacggatgatctgggaatgtctttctatcttcatgattgttcgctcctaattatttcgcatcttcttccgaagagtttccagaaaactaatgttattgatcttgatgatccgggtggctttcgtcgacttctcaattctgatccggtcgcctgtcaccattggcatcgcagctgccccgtcaaaatacgccattcccttttcgatgccgccttcttttccttctcccagttctacctcgatcacatcttccggtgcaaatactatacttctggtattcaaggtatgaggcgccagcggcgtcataagaatcatggatgctgccggagatatgatcggtccgccggcagacagactgtagccggtagatccggtgggtgtggaaataatgataccatctgccttgtacgtattcagataggtatcattgacataattattaaatcgtaccacacgcaacgagccttctctgctgatgacgatatcattcagggcgatatcactgttctctgcctgtccttcatgaatgagcgtaccgaacagcatcattcttttttcaatcgtaaaacggtcactcatcagccgatccagtgccggatagatggaatattgatcgatctctgccagataacccagagtacccatattgataccaaacagcgggatctccagatctaccacatccctggccgcctgaagaagcgttccgtctcccccaagcacgataatgcactccgtccccccgggaatcctctccgggtctgtataggagtaagactgtccttcttttttctcaccagcaggtaaaatcacacataccttccgatgtttttccagataatccgcaatcttcctggcaaccgcctgatttttccctcttctgttttccgctccgtttgctatgatcgtaaatttatccatgatattctcttcctgttttcagctgcctcttctgtctcctaccgtttctgtgccggatgcggagttgttgaggacagttctttatgtgctgcctccactacttcatcaatcttaaacggtacttcttcgcagtgttctccttccggaagtttcttcaggtgcagcagatactcgatatttccctccggtcccttgatcggagaaaattccagatggcacggtgcaaaagagatgctctgcgcataggcggttaccatctcaatcacttcccggtgaactgccggatctctcaccacaccctttttccctactttttctcttcctgcttcgaactgcggtttgatcagacatacgacttctccgtcttcggtcagaagatttcttaccggaagaagcactttggtcagagagataaaggatacatcaatcgaggtaaactgggataattcctgaatgtcttccggcacgacatagcggatatttgtccgttccatgcagacaacacgttcatcgttacgcagtttccagtccagctgtccgtgccccacatcaatagaatatacctttaccgcaccattttgcagcatacagtctgtaaatcctccggtagaagcacctacatccatacataccttgtctttcagggtaacaccaaaatgtgtcatcgctttctccagtttcagtccgcctctgctgacataaggtaacgtatggccttttacggtgatttccacagtgtctttaaacatggagcccgccttatcttctctctgtccgtcaaccagcacatttcccgccataataatcgctttcgctttttctcttgacggtgccagtccacggctgactaccagtacatccaatcgttctttcattcttgtatctcctgtctcatttctgcattgtaactattccggtaattgctcagtacttttctgttgttcttctttccatcgaagaattctctctgtcacagatgcactgtccatctgctgctgatgcatcagatcttccacacttccatgcggaacaaattggtcttcgatcgctacgatccgaactgccggactgtgcagtctgcttccataatatgtcattacctgttccccgaaaccaccggactttacattttcctccatagtcacgatcaggctgtgatcctctctcagtatctccagcagatccatatccagcggtttcacaaaccgcatgtttaccagagtaggttcatatccgcagtttcgaaggttttctgttacctgtacggctgtccgtaccatatttcccactgccagaatagcaatttcttttcctttttccagaatttccgcttttcccatctcgatcggggcacggtaatcttccagacctatataggcttctcctctcggataacggatggcaaccgggctcttctggcgtatggcaaatttcagcatatcagacagttcccatttgtttttcggtgccatgaccgtcatattcggcatcatggacagataactcagatcaaagcagccgtgatgggtctctccatcgcttcccaccagaccggcacgatccacggcaaatacaaccggaagattctgcatacatacatcatgaaggatctgatcaactgcacgctgcaggaaagaagaataaatggccaccaccggacgaagaccgccaagtgccagtcctgccgcaaaagtcaccgcatgctcttctgctattcccacatcgaataatcgttccgggaacatattaccaaaccgtttcaaaccggttcccggtaccatagctgcggatacggctaccacatccggttcccgatcaccaaattttctcataacagtcgaaaaaatatctgtataggatggatttccattcgattttggaagtccggtttctatctcataaggtgctgccccgtgaaatctggccggatggcgcatcgccggttcatatccacggcctttttctgtcagcacatggatcagtaccggaccctgcttccgttttgcttcctgcaacacttttcccagttgccgcatatcgtgtccatccaccggaccaagataggtcagtcccatattttcaaaaagcattccaggaatcaccagctgtttgatactgctttttgtcttatgaagtgcatccaccatgccatctcccactttgggaatctttttcagagcgttggttacgcccattttcaactcagtataaggtgccgccatccggatatgatccagataggaggacattccacccacattccgggtaatggacatctcattatcattcaaaataataataaaattcttctttaattccgccgcattattcaacgcttcatacgccataccgccggtcagcgctccatcaccgatcacagaaacaacctgatagttctcccctttcaggtctctcgcctgcaccagccccagtcctgcagatattgaagtagaactgtgcccggtatcaaacgcatcacagtcgctttcttttctcttcggaaatccacttaagccacccgtctttcgaagggtggcaaactgttcttttcttcctgtcagaatcttatgtgtataagcctgatgacctacatcccagaccagcttatcttccggaaaatgtaaaaatcggtgcaaagcaatggtcagctccaccacacccagattcgatgcaaggtgtccgccggtctcactgagcgaccggatcagaaaatcacggatttcctgtgccagctgctcacattccgaaagagataattgttttacatcattcgcctctttgatcttttccagtatcatacgcattcatcctttttaatttctcctgttcaccagatatcctatcaattcccggagaaattcatttttctgaggaaatgtatccagaagttccagtgcttcctctgaaattctctccacgtccttcgccgcaccctcaagtccgcgaagtgtcacataggtctgtttctgattcttttcatcgctgtgaatcggttttcccagttcttcttccgtgcttgtcacatccaggatatcgtcccggatctggaacgccagccctactttactgccgatctgttccatctgcgcgttctcttcctctgtggctcctgccagaaccgctcccaccatcagggaagcctcaattagagccgaggttttgttttcatatatataatccagcatctgacgccccatgagttttccttcgttggtcacatccacgctctggcccccgagcatcccatacatgccggtctttctcgtaagtaatgccatggcttttccaatcgccggattcgccggctccagggaaaatgccgtactggctgtctcatatgcataattcaataatgcatctccgcttaagattcccagtgcttccccatataccgcatgggtagtcttttttccccgccggtacaaatcgttatcaattgccgggagatcatcgtgaatcagagaagatgtgtggatcatctccatcgccgcctgaaatggctcaatgatagccgatgttcctccaaacatccgatatgtctctcccatcaggatcggacgcagccgttttccaccggcctccatgctgtaattcatagcttctgccagctgtgcggcaaagccttcttctttcggaagatactttcgaatcatgtcttcgcattccagtttcttttcctgcaattctttttcaaaattcactctgttcaccaaccttacgggatttttcatcattttgtaatggttatcatttttttctctaccgtgtcaatcttactgttacacgttttcaccagttccatacctttctgatataaggcaaaagaatcttccagtgaaatatcttttccttccagcttttccaggatcgcatcgagttcctgaaacgcctcttccatgcttactgtttttcttggcatatgctctgtctcttttctatttctaatacctgtcagtgacagctattcacagttatccggttctttgtctctactggcattccactcctccgaatgctctgttttttctacattcgaccagatcacaccatctttcacataagttttcatccgttctcccaccgtaacctggtttaccgaagagatccgggttccgtcctcatgttccatatagccgagtccctgctgcagtttttcgagtggagatacgccgcgcaaccgttccgcatacagatacagtcttgttttctccatctgcagtttcttttccatccgctcggtaagtttctcttccgcccgcagcagatacatccgtttctcccggatctggttttcaggactgagatacgccagacgtgctgccttctcagtcagtctctgtctggtcatctccagtctgctgtccatagacagctccagtctccgcacataacctgcgagcacttcctgccagccgcgataatcaaagacagcaagttccgctgccgccgacggtgtcggtgctcgaagatctgctacataatcagcgatcgtcacatccgtctcatgacctaccgcagaaatgatcggtgtggaacagttaaaaatcgcccttgccacgatttcttcgttaaatgcccaaagatcctccatggatcctcctccacggccgacaatgatcacatccacaccaagttgatccagcgcttcgattccttccacgatgctttctgccgcatcctctccctgcaccctggcaggatagagaataatctgcacatatggattcctccgggctgttacatttcggatatcctgaataaccgcaccggttggtgcagtcactacacccagcgttttgataaatgaagggatcggctgcttgtactccggtgcgaacattcccatatcttccagttcttcttttaatgcaagaaaccgttcataaagaatcccggcgccctccagtgtgatctttctcgcatacatctggtatttgccatcccgctcgtatacatccacgctgcctgttacaaccacccggtcgccatttttcatggcaaatgccagtccttttctctgtcccgcaaacatcacacaggccagagaaccactgccatccttcagggaaaaatagatatgtccggaactgtgatatttgcagttgctcacctcaccgcctaccgagatccggctcagcataaagtcctgggtgaacatatttttaatatatctgttgacctgctctaccgaatatacgttactcatccgcttcttttgccagttttccgagtacaccgttgataaatgccggagcttcgctgccgccgaactttttcgccagttctaccgcttcgttgattgccacttttccgggtacatcgtcatcataacgcagttcgtagactgccagacgcaagatagaaagttctactttacccatgcggctggttttccatcctttacttgcctcgttcagtgctgcatcgatctccggcagtttttcacggatcttttcatatttttcctgaatataactctgatctttttcctgaatatcttcgattgtttccagatacagttgtttctgttctgccatctcctgattgtcgttaaattctgtcataaacagcagctgaaaaatgctttctcttaattctcttcttcccatggttttctcctcgtattcgccagtagtaaaaaagggagccttcatccagaccccctttccttccgtcctgcgttctattttatttttcctcttccagtgccacaccggcaatgctgatgtttacatcggaaacttccagaccagtcatattttcaatggctgtttttaccttttcctgtacttttttacaggtttccggaatactgtatccatattccagattcaggttcagattcacgcataccacattctccagaacatctactttcacacctttggacaggtttttcatacccagttttccaaccagttcgttggtaatatttcctgccatagaagccacaccttctacttcggtagctgccaggcctgcgataattgccacaacctcgtctgcaatctgtacttttccaatagtctgatcgtcatatatggtatacgtatcacgcatatcttttttattatctgtcatttcaaaccctccttataatcaagagttttcccggctgttgtctgatttttcagtcaggaaccattatttatatctattatatcaaaaatttacataaaatgaaagggggattgccttagtttttactgaattcttccagttgcagattctcgtttcgatcaagcgtcattcccacactccaggagtttacaaacaggagcagtggattgcctttcatatcttttactttcttcatatctgaggttccggtcagtttttccacatcgatttcttctttgtttgcgatccagcgaatatgttcatatggcagattttccagacggatatctacgttgtattcgttttccagacggtattttaacacgtcgaactgcagcacaccgacaactccgacaatgatctcttccattcctcccatgtattcctggaagatctggatagctccttcctgggcaatctggttgacacctttgacgaactgttttcgcttcatgctgtctaacagacggactcttgcaaaatgctctggtgcaaaagtcggaataccttcataggcaaatttattgcccggtgtacatacagtatctccgatagagaagatacccgggtcaaagacaccgatgatatctcccgcgtatgcttcttccacaatgtgccgatcctgtgccatcatctgctgtggctgggacagacgcatttttttatcgccctgtacatgataaacctccattccggcatcaaatttaccggagcagatacgcatgaatgcgattcggtctctgtgggctttgttcatattggcctgaatcttgaagacaaatgcagagaaatcttccgtcatcggatcgatcacgccacagtctgccgttcttggcagcggtgaagtggtcatagtcaggaaatgctgcaggaaagtttccacaccgaagtttgtcagggctgatccgaagaataccggggaaagttttccgcaacttacagcttccatatcaaattccgcacttgcgccatctaaaagttcgatttcatccatcagctgttctttctgatccggatccatgacctcatcgatttttgcatcgtcaacatcaagttcttcgatatgtccttctttggttcctttcatggtatcgaagaaggtcagaacttttctggtatctctgtcgtagacaccacggaatttttttccggatccaatcggccagttgaccggacaggtaggaataccgagttctttttcaatatcatctaaaagttcaaaggtatcattggcatcgcggtccatcttattgatgaaggtgaagatcgggatgtggcgcatggcacagactttgaaaagttttctggtctgcgcttccactcctttggacgcatcgatgaccatcacagcagaatcggctgccatcagggttcgataagtatcttcggagaagtcctgatgtcccggggtatccaggatgttgatgcagtaaccatcgtagttgaactggagtacggaggaggttacggagattcctcgttctttctcgatttccatccagtcggataccgcatgacgggcagttgcttttccttttacgcttccggcgagattgatggcaccaccgtagagaaggaatttttccgtcagagtggttttaccggcatcggggtgggatataatggcgaaggttcgtcgtttttgaatttcatttgtataatctgtcacagggggtcctccatttttcggtttgaattggcatcatatttttgctcatacggtagatattttagtatatgagatttgtggatgtcaaggggtgattcccgttttctttcatcttctatatctgttgttactgttcactccgtacccggtaacacgctttgcgatatcccgtcataggagtttgacagttgaatataagaaaaatgctcgcaggccttatggtacctgctttttttcgtcaaattatttgttttattttatcataaaaaaaatcgctaacccccagtaaaatcaagggggtacagcaatttttttgttttgtaactgtcaaagatgggattatatatcgttttattattttcagtcaacgggacacgcttatttttacagatatttttgtcccggtcaaaaggaggcaaaagaaaaatgacgatactgtacagtctgctttctctgcacagtatcgtcattttcacggttacgatgactactgaatagtacatcgtttcataaataactataccatacttatttaattatcttcagttcatactctcttgttccaagaccaatcttttctgcctgatccagcgttgctttccactcgatattcggattggaatctttgaaatgatcgtgatggcagtgccatccttcctctgccaaatgttctcccagctggctgtttgcaatcggtgtggctttcagacaggcatctgcacacgcctgatccagtgctaccgggtcaaaacttgcaaacattccgatatccggaagaatcggcgcatcgttttctccatggcaatcacagttcgggctgatatcctgtaccagtgcaatatggaaatgcggacgtccatgacagacagcctgtgcatattcagccattttacggtcaagaagttcattggcactgctgtttggattatataccgcgtcaaaactgcaggctccgatgcatcgtccgcagcctttacacttatcgtaatcaatcactgcttttttattgacatatgtaatcgcatcactgccgcattcctttgcgcagcgatggcagccacgacagacttcctcattgatcgccggttttccacttgcatgctgctgcatctttcccgcacggcttccacagcccataccaatgtttttgatagctccgccgaatccggtcgattcatgtcctttaaaatgactcagactgatgaagatatctgcatccatgatcgcatgtccgatcaatgcagtcttacagtactctccattcacaacaggaacttccacttcatctgttccacgcagtccgtcaccgatgataatctgacatccggttgtagtcgtgttgaatccgttgagatttgcacagtccagatgctccagtgcgttctttctgcttcccggatacagagtattgcagtctgtcagaaacggcattcctccctgttctttacacagatcagcaataactttcgcatagttcgggcgaagaaaagccaggttccccagttctccaaaatgcatcttgattgctacaaattttccatccatatcgatatctttgatacctgctgcgacacagagttttttcagtttgaccagctggctggttcctaccggacatcgaaagtctgtaaaataaacagtagatttctccatagttcatttacctcctgtataagttctttttcataaataataacatctcaagtatacttgatgtcaagtaattctcaggttttttcgcgaaatttctctctcattcaccaaagggattctttcttctttctgatgctttccgcttgcatttccatatttttctctgcacagcagtattgctgacacactgaaagcaccggaacgctccgaaaaagtacagaacagactaaaatattcctttacaatctgtgcaccataatatattcttcctctttatcctccacaatttcaaatccgagtttttcatacatccgtgcggcgtagtttgctttctgcaccgacagagatacctgcggatagccctgttgttttaatgcggtaagcatctgctgcatcagcgctgttccgattccacattgtctgaactcctcaagaaccgaaattgcaagcgaaggcgtatcctcatccacatgcccataatcatccatgatccggcaccagaccgcccctgctattttcccagatatttccgccacatagcagatatcatctttcttttccccaaaatctgcaacatacacctgcaactcaggttctttgatgatctctttcggcggtgctttggttccttcggggataaaaattgcttcatacagaaaatcgtctaatatatgtatttcttcctgacgtaattttcttatccgatatgaaacattcttcatttttctcacctcctgtatggcatcactgttttgtatagaaatcttctacttctatactctgattttcatcataacatatgatctgcaattccggcaactaacatatatataataatctctccgaaaaatcctcacacagggattctttcttctggtatactaaaaggcaaagaacgtaatggaaaatgaagaagatacggtaaaagaagtggcagataccgtcacattcacaaatagtgaggacggaatcgccatgcattaaaggaggattatcaggtatgaaagtagtaatcgccatcgattcatttaaaggaagcatcagttctccggatgccggagctgccatccgtgaagggatccaccgggtattcccagatgcagaagtttttgtccgccctctggctgacggcggagaaggtacggtggaagctctcgcaatcggtatgcacggccggatccgtacagtaaccgtcaccggtccgctgggtacacctgtagaggcagcttatggaatccttgatgattcaaagaccgccattatcgaaatgtccgccgctgcgggaatcactctggtagacgaaccgaatcgaaatccgttatatacaaccacccacggcgtaggtgaactgatccgcgacgccatcgtcaacggatgccggaacttcattgttggtatcggaggaagtgccacaaacgacggcggcatcggtatgcttcaggctctcggatatgaatttcgggataacaacggacagccagtttccttcggagccaacggtctgtcaaagattgcaacaatccacgacacacatgttctcccggacctcaaagattgtcactttaaaatcgcctgcgatgtaaccaacccgctttgtggtccccagggctgcagcgccatcttcgggccgcaaaaaggagccaccccggacatgatccaccagatggatcaatggcttgccacctacgccaacatcacccgtgaaaaatacccgaatgccgaccctgaccaccctggcaccggagccgccggtggactcggtttcgccttcctttcctacacaaatgccatcctccagtccggcatccagatcatcctagaagaaaccagactggaatcctgcatcaaagatgctgacatcgtgatcaccggtgaaggccgcctcgatggccaaaccatcatgggaaaagcccccatcggtgtcgccgccatcgcaaaaaaatacaacaaaacagtccttgctttctccggctgcaccacccctgaagccagcctctgcaaccagcacggcattgacgccttcttccccatcctccacaccataaccaccctggaagaagccatgaccccggaaaccacccgccaaaacctgaccgacactaccgaacaggtcttccgcctgatccaggcagtacagatacactaaatatcactcttgtacattccagccatatccataattgacttaatccactggatcaattatgaatatacaatacagcaaaaccgaggctgagattcctcttctcacctcggttttatctatgtaatactatgacatttgggtcaaaagatatttttgacctctttgacactggattgttccgtacctccctcgtactctcacaatcctcaaaaacattcgcaattcgctcatttttcaagttctcagccagcacccagcctgaaaacagaccgcgctgtttgcagcaacactgtgtgggcgtttagggcaagctttaagatccgacgcttacgcaggctttcgcgagggtcagccgaccctcgtgaactatagccgaagttagcggctagcttaaagttgccctgcccacgttgcagcagacagcgcggtctgttttcgggcgtccgtcttccacgaactaaacaatggattacctcaaccttactcagcccaggtcccatccacaaaaatatccacttcactgccatcttcccggatccccacaatatgcagatcatctgatccaaccataaagtccatatggatcatagaatcattaatccctttcgcatagatctcctcatccgtcatatccataaatccttcaataacctcagaaaatccacgtccggcagccacatgacagcatgcattttcatcaaacaaagtgttgtagaacatcagaccggactgattgatcggagactccttcggaaccagtgccacttcaccaagcatggaagcaccctcatccatcgcaaacattttcttcaggacttcttccccctgctcagcgtggcagtctaccactcttccgtctttaaaatcaaccgtaaaatgatcgatgacctgtccggaacggcttaatggtttggtagaaaccagacgtccttcacattttcccttcatcgggcttgtgaaaacttcctccgtcggcatgttcggaacaaagaaagcacgattcagatgattgatatctcctgcactgccccattttgctcccggaatcagatccacacgaaaatccgtaccattgttgcttgtataatgcagtgttttaaaattctgttcatttaaccaatttgctttctgcgtcatccgttcgttatgtgcctgccagatcttttccgcatcctcaccatctttcagatatacgcagtcaaagatcgcatcccacagtttttccactgccacatcctctgtatcatccggaaatacttttttcgcccattttccagaagctgctgccacgatcagccactgatgtttaccatcgatctgatcacggtattttttcatgactttctgacgcatctggctgacggtagagatcagatccggggagattcctgccagttcatccgggtcagaagaatcaataaagatacgaaccggcagatccacggtcatctgtttcgcccgctcctcttcccataccggtacttcaccgagtacatctgctgccgcatactgataatgcagtttgttgatttctccgcactcccaaaacatctctacataacttgcacctgctttgtaacactcttcagtcaccatctttaccagcggaatctgatctacgcctgcctgcagacggacgcgctgtcctttctgtacattggctccgatctttacgatcagtttcgcatattctcttaatttgttttcgttcatactaccttctccagtcattttctcatattctgtcatcggctgtcactcatctgcgacacccacagttacttatgagtatacccgctttttgtacgggatgcaagcacggtctttctcctgtgcagtcacacgaaaaacgcctcgcgggatattaccagcgaacggtaacacacgcggtaatcaattgcttcttgtaacttcctgccccatatactataatacgatgtgatcggattgcttcattgctacgcaattcccgcaatccttgaataccgaagacaaactttcgcacaggaggacgcacatggaatatctggatatcgtagatgaacagggacaaccgaccggggaaatcgtttcccgcacccttgcacacacggaaggaatccgccatcgaacagctcatatctggatcgttcgcaggaaaaacgaacattttcaggttctgatgcaaaaacgtgcaatgagcaaagattcttttcccggaaaatacgatacgtcttccgccggtcatattcaggcaggcgatgaaccacttgcatccggcctgcgggagcttgcggaagagctgggacttcatgcaaaaccggaagatcttgcatttgccggatgcatccacggaaattttgcggaaaaattccacggaaaaatcttccgggacaacgaaattgcctttgtctatatctatcagcagcctgtcgatatcgaaacactcgtcctgcaaaaagaggaggtggaatcggtgcggtggtttgatctggaagaaacataccggaactgtcgaaaccgtaacacgcagttttgtgcccctgtcccgggactcgaagttgtacggcaatacctgtacagttgaaatacacacatgcttatcctacctccagtcactttctgcttcgtccagtttctccaataatgtctcgttaagaatcttgaaagccggaataaagctgtcacgtatcagtatgatcatttcattcacttcatcttcattccatatatggacagatgtattacgcctttttaacataagcagctatacttctgcatcgttaataaatccaacgtaactgttcagtaccttcacagttatcgcgggacagtggctactgaatagttacaatccaactttataaccaagctgcaggatttcacggggagatcctgtagaagctccctccacactgtgcattctcataatttcctgcaacgctttccatgcaagttttacataaatttttcattactgcgcatgcgtattttacacagtttttttataatcatgacagtaaaagaaaacaatatgaataagatcaaacacagaaatgagggatcgttatgtataaaaccgtatggaattttatgaaccatcatgtaaaaagctcacatgtttcagcaatgtttctcgcaacgctgctggcgggatggacactgatcggactgcttgccggttctgttgtctgcctgatcagcaccatttccctttctaccaaaacagttgtcctcttttgttctgcgggttacacaggtctgattttcggattctttggaggtatcttctatctgtatcaaaaaacttcgcctcacaaagaatcctctataaacgcaccattaccactcggaacccaaaaggcagcttaagctgccttttttatgatcccgatgggattctcaccagaagtttctgtccgtccttttccaccatcgtcagcaccggaatatgtttctttctcagtgcatgaacgaccggatatcctgcaaacatatgatctgccacataaaccgcctccggtttatatttcaggatctgctttacctgtgttttcacaaacgctttccattcctgcttttccatcacaacttccccgtagattccatgaagttccagctccggaagttccgcataatccatatgaatgatccgcgcagtctgcagacccggcagttttccaagcagtttatctgccgctgcacctccaccaaagttcacaagtaccggttcttccctgtactctgcaaggctgatctcgcatgctttcaccgcatcttccaacgtccctgtggtcagcagaaagcctcctttatgacagaatcctgcacttaccagccctgtttctttctgtaattcttcattttccagacccagccattcggatgggaaactgcatttgtaattcagtgaatattctttcttctgtggctggatacagtatccgccccggttggacggaaagatcacaaaggctatctccgtctcggacagtcttttctgacacggtacaaattccggaagaatcagaatcttcgcctcattttctgtcttttcgccggactgtaacgctctctcatgcgcttcaagaatctcttccacccgtctgtccgcccgttcatttcccagataccgctcgaatttattctccagaatcatccctgccacactgaccgcctggaaaaatgcttcgtcgttgctcccgccggcatcccaggtcggattaaagtttccgatcagcgccgccagttcattcttctcaccggtattatcgttgttatctaatggctgtacaaacgcttcatcaaatttctgtgccagttcttctcccaggatctctgcccccagtgcttcccacaaaagcccaagcgccgcatacgcaactccgttctcccggatccgactgtctttctggtgatgatcgtactgccctcttccgatatcaaaaacaatcccctcgaagtcttccggcactttattcccccttgtgatcgtaatctccgggttcagatataacagcagagctgcagaaaacacatcatctgcatgaaactttccgctgtgggtaaaggcagccgcatgttcctgtctgatctgttttaataatgtatttgctttcattatatattctcctcgtatctcattcagattctatcatgatctccattcgtcgttcgccgacatcgcatcctgctgaaaagcaaaatgcaaaaactatcatgaacgcctactgttccttatgaacaaactgcgtttactcccactcacctgtccctataatatcataaatctcatgcagatctgcgatctcataatcaatctttacatccgcataccgctctttatgatccggattgtaccagcaggtcttgattccggcgttgttgccaccgcggatatcgctggtgagagaatctcccacaatcagtacctggtctttttctacaggaccgatggtttcaaacatcctttcaaaaaactccacgtttggtttttccacgcctagggcctcggacaaaaagatgccgtccatcaattctcccagaccggaaagacgcagttttttctcctgggcaacgaccgtgccgtttgaaaccacatactgtttcacttttccccgcagggacttcacgatttcataactgtcatcccgaaacacgatggtatctcccagacatagctgatagcgttcgttgaacgcttccgccacatcactgcagatcccttccgtctcaaaaaactcccggaatcttccgaccagtacctccggtttggtaagttcgccgcattccagctgttcccagtacgacctgttgatcttcgaataccgcctgatcatctcatccgtacattctcccagatcaaactcctgaaacagtttctttatcgctgccttctctgccgcaaggaaatccagcagcgtggcatctacatcccataaaattgtcgtaatcatgcttttctcctctgttcgtttatctttcatgtatttttatcataacacaaaacagcgacagggcacagatatgttttctctgtacactatcgctgtatcctttaacaataaaattttatctcgtctgttacaaatgcctgtttccattttgcacaaattggttcaccgtcagttccttctttttgagttccacaatatactccgttgtcccttcttcgaattctctcttccctgtcggcacaaagccatgacgccggtaaaatgcaagtgcccgctcatttttctcaagtgcccacagatgatctgcaccaaactgttccaccgcaaatgttatcagttcatgaccgatttttctgccctgaaaccatggatccacatacagcttacagatttctgttccgttcatctggataaagccacggatcagtccgtcatcatatatatagagatttttgaagacctcgtcttttttcaggtaattatctataaaggaaacaacctgcaactcaccgaatgagtagctctcatctttgaatatcggaaaatagttgattctgttattgcagataaatatttctgcgattcttgataaatctttctctttcgcttttctgattgacatctgcttatcccttccttctgttcgatatgtttattgtaaatcaaaacaatggcactgtacagagaacgaatttttttcaaacacgctctgggctgtcacagaattctttattttctgtaacagctcagttttcctacctcatcttcttccccaaatattttttcatcgtctccgtcaattttttctcatccagcggttttgtcagatgctcgttcagaccggctgcaagacttttctcaacatcctcctgaaaagcatttgcactcatggcaacaataggaatcgtcatagcatccctgcggttcatgcttcggatatgacgcgttgcctccagaccatccatcaccggcatcataatgtccatcaggataatgtcgtagaatccgggctgtgatgcctcaaacatttccaccgcttccttaccgttggatgcggtaaacacttctatctccttctgctccagctgaaatcttgcaatttccatattcagattattatcctctgccagaagtgctttctttcctttcaatgacagatgttccttcggatcgtcatcgattttcggatgatgatccactttaaacggaagaacaatcgtataacgggttccttcgttgatcttactttccacctggatcgtaccacccatcagagccaccgtttccttgacgatcgtaagtcccagtcccacaccgttaatactgttcaaagaaatatgctgttcctgcgtatatggttcaaatgcatgacgcaggaattcctcttccattccaataccggtatcttcggtgacaaattcaaaccacgcagtctcaccgtcgcatctcagttctttacaacgacagtaaacggttccgccctttttgttatatttgatcgcattgctgttcagattcagcaggatccttgagattccttcctcacttccgatcagataacgatgcttgatatatcccggtttccagtccacaaccgaatgcaaaccctgtgcatcgatctgaatattcgtcatcgcggtaatctccatcagaagatcgaccagattaaatggtttctccgaaagttcaatcgtcgaattttccagccggttcatatttaacacattattcaccagcgataccagataattggatgcgatccatatcttatcccggcactctttctgctttttcatattgtccggaaaagcatccgcaatccgtaacatcccctgaataccatttaacggcgtacggatatcatgagagattgatgacaggaaacgtcctttggtctcattggcagatacggcatgttccttttcctttctcagtcttttgttcaggttttccgcttcgatctttaatgcattttcatgaaattcttccgttatatcccgtatataagaaatcgccaggatatctccgttttcttcatcctcatacatcacaatatgatgttctgccagcatcggtctttgccggatcgtttgtgtccagtatgtatgtgttacatgcgtctctcctttttcataatgtttcagaagcaccggaatatcaaaaaatgcataataagcctctttctccttttcagacaaccgttttccccagtagtcaattacttcactgaattttgcatcagccggaagaccggtcatttcattgacgttatattcttttccatccactgcctgatacatctgaccgggaaccagattcctggtcagattaatattataatacgcgcctgcaaccgcagctattatatgttccagaatgtcgattttcttttttgatgtctccataagagtttcccccgcaatctcatttcccgatctctaatatctgtctccagcaacttctttcgaataaaatgtaataaaaaaagaaacagtccacctgatatacaatcgaactgtttctatcacttttgcagaccacggagcatcgcaagtaccacttcctgttcctgcacactcagatcattccatatcgcaaggacttcgctttgcggctgtgtcaggtcatccggatctccttcacaaaaaaactgcgacaaggttacgtccagagcttcacagattttctcaagcgtaggcaaagatggcagactttcttttgccataattcttcccagtgaagactgggcaattcctgtcatctgcgccagccggtatttgctgattccacgcttttcacataattctatcatattgtcagctatatactcctctagctgcaagcaaatacacctcttttccgtcattacatattgatattattttacctgtaatttggaaactttattagaagtatatttcagaagtatttagttgctttttcagaagtatttatcaaaaaaaaataagcatggacggatattttctgttcttatgcatattatgttgctgaaattattctatatgtatttttatagtaacatatcttttctgaattttcaaacattataatacgctactttttatacttattaggtctcatgcaagcacggacttcggcacattgctcgcgtgaatctaaaagaaccggcaggtttttcccgcttcctgccggtttttcctgatcttatctgttttaatgattgtctgctatatcacagcatctgtttctcagcacttcttctccgccaatcagctgttgttcatattcggtataggcaggacagccatagcttccgaggaactttcggatccggtcattccttgtaagattcgctgcgaataacgtcagctctgcccctgtaccataactttcttccagaaatgcaaatcctcgttccagattctgcgagatgcgctcctgctgttcgtcacaccgctttgtttcttcctcacagacctgttccagccgtcggttcagtgcttcctgcccgctctcatggtctgcttttgcctgctggtcaatcttccacagtatcttcaacaccgcctcttcggtctgcctctcttctcctcggatcagttcccgttctgtgcggatctgcaaacttttttctctgctctcgatccagtctccgaatgtcttttctgcatcattctcccggaaaataccgagctgtctgcaactttctgtcagcactttctgtatctgactttccctgaaaaactgttcgatgttctgatccagcacagccagcagaaacgccagtaccatactgcgctcttgtggtgttcccttctgtgccatccgggtgatcatctcccgttccgcatccgaaaggcttccgtccagaacctgtctgatccggtaatcctgtccgtacttccgataaatctgataatacgaaaaaaattcggctgctgtcttttcttcctgaagatactgctccaccagcattttttctaccggaaatcccattttttcataacttttcagcactgcagacagatcttcccatccccgtgccgtcacaaactgtttttttccgtcctcctgacggatccgatagaaacgatctctgtgtgcttccagatacgaccggatactgccgtgtacctgatggaacaatgcatattccatccagatatcgatatccggctccagcacgatctttcggacacggtccagcgtcgcgatgtcaaattcgcgcacagatttgttgtattccggcgggttgcccgctgctacgatgagccagtccgttggaagcttctggtttccaaacgttttgtcctgaagaagctgcagcatcaccggagcaagtgtctctgagacacagttgatctcatccagaaataaaattcctctctttttcccggttttctccatgcaggcataaatagaagcgatgatctcactcatcgtatattccgtcacgctgacctgtgcatcatcaaatgtacgctccacgatcttcggaagtcccatggcgctctgtcttgtatgatgggtcatcgtatatgctaccagccctgccccacattctccggcgatctgttccatgattgctgtctttccgattcccggaggtccgatcagcagaatcggcctttgctgacgcaacggaaccagtggatacccgctttcatctttctgaaaatacgcctgcagcgtatattgtatcgtttcttttgcttctttgatattcatccgttttctctttcccctgtattatttttctgtcaccagcagtttttttgcccatcccggtacccggtccatcttctcactcttttttacaaatacaaatgctgtctcataatccggcttcttctccggatagatcccgtcaccgtcggtgaaataaatcagtgctttcaggtcgctgaattctcttttctcccgcatccgtcctacttcctcgaacaccgggcgaaaatcggttcctcctcttccgtggatcaccagctgttcccggtacgcttcccattcttttgcggaatggatcatcactttttcctgaataaaactgtcacactggatcaggcatactttccagttctcgaaaaaattttccttttcttccagaatccttctggtctctccaaggaaacgggctaccatttcttttttacaggatccggaggtatctatggcaattaccagttcctccagccggttcccctcccgggtctcgagaggctctatcatgggaagatttccataccgttccatcccataataataagcaaccgggtcaaaggcatcctgatccagtttcatctcctctcttgtaacagtaaaacggcgtaaaaaccgtcggtagtcatattttcctttctcaattccggaaagttcttctttctgaccaccacgattctcgcctcttcgttttcctcctgcaccataggtaatcgcaagttcttttgcgatctctttccattttttacagattgctttctgtttctctgtctcttttccgaaactttccggcatctcgatgcactgacgaatcaaccggagatattcttcatatacgttctccggattctctccgaaacggtgaatcagatactccggattcacatacaggctctccccgtctgtcctcatagcggttacctgctcatccggctgcacccggagttccagcagcgccctgccaagctccggataccgccagcataactcatttttgcagtgtttcatcaggcctgtgatcagctcctgtttcgtcgctgtattcggagatttttcttttgttgaaatatggttcttccacgccaacaatacacggaaggcatcccattttttcagttctcccgccctgctcagaaaaccgttcagttcctgctctccaaaccatcccctgtctgccatttttttcattccatcgatattttcctgtacgatcagatattccatggcggggcggatcctgcgtttcagatagattgcttcctcttttgatatttcttcgttttcccgggtgttttgcagaaaacgtccgattacttcttccagatgttgttgttcattcatttgtatacatcaccgttttttgtattctctatccatcgtagcaccctttattttaatttacaagcagatccttttactgattttcctgtgttccgtcttccggctggctgctcatcggcgtgatcacaatattttctgccgcaataccggttttccgttttacgatatcctcgatctgcgctctgctggcatcatccaccttggtatccggtactacaatatctgctgtctctccggtcagattcacaaccacatcaggaaatcctttcgcttcgagaagcagttctgccgcagcttctttctccacaagatcagtcatatttaccatactggcgattgcactttctttttctgtctcggaaagggcttcgttgttgatgatcgataacagagattctttattctgggagcgaatctgttcccgttcgatacgcgcctgggccatatatgtagaagcacctgtcagaacagcctcccccggtgtctcctggggctgtgattctgtgccggatgattcttcaccggaagccgtggcatctgtaccatcgccggcagtcgccgcaccggtctcatccgtaacatcaagatccagattttccatatcctgcagaacctgatccatattgaccgaagtttccgcctcactggaggtctcggtctttgcagtcttatcttttttcccttttaattgtgcatcggaataactgatatagcctgctgcagcaatcattactgccagagccgtgataatgatctgattctttttaaatatttttttcactgctgctctcctttttattcattttgacgggtctcatttcatttttaacactttgatttcgtgggcttcgacgtgaaacaatgctatcaccgcctcctggatctgttgtacgatcaccgggttgccgcctccctgtgccacgacgatcacgccgcggatctccggataggtacttgaggatatatagggtgtctgtcccccgtctccggtatcctcgtacactgtagtttcccccgtggttaccgtctgactgctccgctgcgtcccggaatctcctttttcactggaagtactggtatcctccggactgtctttttccacctgtttcttcccggtagattccatcgccaccgccacctgtactgcacccacaccttctacctgcgacagcacgctctccagctgtttttcataagactgccggatctgatcgtcggtctgctcctgtgtctgcgaaactgttgtcttttcctgtgtctttttttgctccttttgttttacaggagcggcaatcacaagaagtaaaagacctgccagcccacagatcagccactgctcccgtttcatctccctgactgctgcaaacactctctccttcatagtctactcctgtatctttatatttatattcccttccggaagattatagacttgtgcaagttttctttttacctggtcaggctcaccttctccggggggattcccgtccgcacgccggatcacacaacggatctctttcacatccagtttctccccgttaaaaaagtccacccttacttctgtactctcgtaagacagctgctccagcagtgtttttatctgtctttccatctctttctggcagtttttctgtacataatcctttccttcctgttccaggtattttttctccattgaaaagtcctcatattcctgccggattccttccgaaagtgtctcccaggagagtatctgttccagttgtccggcggtcaataacggttggatcaataccaatatcagcaaaagtcccataaaaaagcggatatattttcgttcttctccctgtgggatcacgttcatcagtactgaaaggaaaataaaataaaacgccagattgcgcacccaccgggcaagccattccaatgttcttcctccctccgtctttttgtaattccctttttattgcagggaacctgccagaatcgctatggtcagcaaaaacagaatctccatggtcagcagaagcctcaccagcagcccaagactctctcccatcgtgtggatgcaccctaccatccgcttgtccgtcaccggctgcaccacagcagccagaaactgataggcaagtgcgctgattcccattcggcaaagaggcgctgcacccgccagcagaaggatcacgatcgccgctgcaccaagaccgtttttaatcagcactgccgatccgagtactacttccgtaaccccggaaaacaggttccccactccgggaatcgctccggctgtcctgccgatcactgatcgcttcaaggtatcaaccgccggtgaaatcatacgctggatcagctggattcctacgatcacgccgatcatggatttcaatgcccagaggattccgttctttaaaagttcggtcatttttgataagaattcttctttcgtaaggaaattgatcagttccagcaccagatacatccggatcgccggaagaagaaaaagtaacaggatcttctctgtgagaaaaatcagaatcagaatcatctggtaaaatgctgtcgcagttgccacaccgcatgccccggtcaacgcaatataatacgccggaagcagtgctttcataaataccgccacaccctcaagcagtctttccatctgaccggtcatctcatcaaatgcctgcagaagcagtaaaaataacaacagatatatcatataaaaagaaatatctccgatctgattgttctgaaaaacccctgacagatgacagaacactgctgacagaagcaccagcaccagaatgtgcacgcaggtttctttttggattcccatggcatcccacacgccctgttggatcactgctttccattgctcggcggaaaatgcctgtccgcttttcaggatatcccggatcatccctcgcatactctgcttttcttccaggagctgatccaccgccatctccacctctttcagatccagttctcccagtgcttcttcctctcgtgaaaagtcctgattttctgcagcatacacacagatccgggtacaaaaaaagagcaggaacagactgaagactgccattttcagtattttcccactctttttcctatcccagaaacccatggatcgtctccagcagtgcggtaagaatcggcatactgatcgccagtactgccaggcgttcgtagatctcgatctgtcccgctactgcagaatagcccgcatccttacagattcctgccgagaactgaccgatataggtgataccgatcattttcataaggatattcatatatgtagtatctacaggtacatattgttgtatttttttcagggattcatacagataactgaactttcccaccgcaaatgctagaataaagagtccggccgccattgtcagataaaccgagtattctggctttgctgttttcataaagatcgcagccagtacacaggcgatacccgccgcaccgatccggataatttccatatcgccatcctccccgcctgcctaatgtactctcggaatctttctgtgcttaattttgtgagatgattttttgtcagttgtgcccaaatttctgaggcgtacgcggtgcgtacgttgatgaaattcgggtgcaactggcggaaaatcagccgcaaaagtaagtgcagaaaaactccgagagtacattctacagagcaaataatttttttacggtttcaaaaagatcataaatataagggagtacccaaaacaataccagtacaagcccggcaagactagttaaaaatgcctgatcttcccgcccgctgtgttttaacacaaggctcaggacggataccagaatccccactgcaccgattttaaatataatcccgacttccacaaccgcctcccgtctcagataaggatcaccaccagaaaggctccccccaggatcccgaggctttgccacactcttttctgttccggcagctgatgccgcagtttttcttcccgcattgcaagttctgtctttccgctctcaagaagctgtatctgcatctttgcatccagatatccaagatgcccgagggtctgtaaaaacagatcccagtcttcttcccggagactggttttttcccgcaccgtctgctcctgctctttcaggatccgtacaaaggtttcgccggtctgctctttcagccgtttcgcaacagattgcagatattcccgaaagggggacgccactttctcgctgatcctggaaaatgcttccggcagtgtatttctcgcataggaaatttcaccgatcaggcagctgatgatcaactgtaatatctgcaagtctttgatccgctgctgatactgtctgcttctccagtttcccatgccccagccggcgaaaaataccagcagagcaccgctgacctttaacacacagatctctgcctctgatacagacaggttccccgttcatcatagatttcccggacttttccgatctttcctgccgtttctttttgcaggatgatatagcgttcaaaaacatgttcttttatcagtcgttccagcagcggttttttccggatctcatcgatcgaacttccgtgaaccgttgccagaagtttgcatccgctgtttagtgtcatctcgatggcacggatatcttcataattgccgatctcatccacggcgatcacctgcggagccattgagcgaagcagcatgaccatcccttccgccttgctgcaacagtccagcacatcggtacggattcccacatcgttttgcggaattccctgataactgccaccaatctctgaccgttcatccaccacgcctaccgtattgcccggaaaggtctcccagccatcagaaatctgtcgtaccagatcccgcagcaatgttgttttcccacagcccggtggggaaataatgagtgtatgacacagttttccatcttccgtcacatacggaatcaccatatccgcacaaccggtaatctggtgtgcgaaccggatattgatgcaggaaatctgggaaagtccttttaccttctgctcttccatgatcgcttttcccgccacaccaacccgatgcccgccctgtatcgtcaaaaatccctgttttaattcctcttcataagcatagagggaatatgttcctaccgtctccatggttcttcggatgtcttcttgtgatacgatacatgcctgttccctatgtctcgtcagaaatccctgctctgccacaaaatattcctgtccgtcctgccataagatcaacggtttccctgcccgaagacgaatctcctgtaacccctgtggattccagtacgcctgctgtaagatttttcggatacgctccggaaacagacggataacttcctcccgtttcatgtacatcacctcttacatttactatatgtggacagactgtaaatagaacccgttgccgggataaaatattttgttatcttgcatactttcatcctcgggtattcagttctccacgcataccatccccgaatacccttccggcatcaccaaccggtaaaacctgcatccatcataagaaatctcatacaatttcctgcagatcccttccccggtatatttcagatagctttccttttttgtccagatctgaaacagaaaatccttttttcctttctccgtaccaacctgcataaaagttttccactcatccggtgtacagatttttctggctgtctgttccaattttatttctctgtgatactggatatcaatccccacagggacatttcccagcacacaggcgatccattctcccgaatggctgatattgaaaaaaagttccggatgcagacgcagatatggttttcccgtctctgttcgcattaccgaatcggtctctttctccagatcatacgcatatcttgtttttatcatttctgctaacagacgatatcccgaccgggactgttctttcttttcttccggtgtttttccactgacctgtttcatccagacttctgtctgctgatccggggacttccaaaaaatatgtgcttcatttgcattattttccatttttctgccctccgttgccacgcttcggtgcttcttccagttccaccagaaaacgggaaggttccatcttctttccgaacctctcctccactgcatacagatgcagttctttctttgctctcgtcatgccgacatagaacattcttcgttcttcttcgatctccggatccagaaccgctttctgatatggcatacagccctcgttaacatccagaatatacaccctctcaaattccagtcctttggcactgtgcagggtcgatacaacgattccctcctgccggcgcactttctccgactgttctttgagtttttctttgtacgcatccatggaatcaaaccattcctgaaatgttttatacccttttgcgctctcctggatctcccgcagaagatcatacagttcttccactttgatcttcctgtactgtgcatattctttcaggaactcgtcatagccgatcccataccggatataattgatagctgcaaacggtgccatatttttcatcattttcagatcatgctcgaacttctcgatccggtcacacatccattcttttccctcgtaaaactgatacagaatctcaaatggcacttctttctcataaaatgcttccctggacagatatcggttcggacggttcatgacggcaagaaaatcctttctctcccgaccgcccattgccagacgcatataagcaaccatattttttgccagccagtgttcatacagattcggcaggacatccctcatggtaaacggaatgttgtactccatcagccgttccactgtcattctgcaattatgattggtacggaatagaatcgcaatctctttgtgcggacacccttccaccaaatccttctgaatctgctttaacaaccaggtcgtctcctcgctctcattttcaaatgtccgtatctcgagcggttttcccttatcattttccgtaaacaactgtttttcatatctcgtatcattccagcggatcacattctgggatttttctactatttctccggtacagcgataattctgtttcaggatcacctgcttcaattgtggaaaatccttcggaatctgcagcatgatctccggtctggctccacggaaccgatagatcgactggtcatcgtcacctaccagaaacagattattctccggaagtgccagaagccggacaatatcatattgcagctggttgacatcctgaaactcatcaatcaggatataccggaactttttctgccatgcctgtaaaatatccggatgtttctgaaataattggtagcagtacaccagcagatcatcaaagtccagcaatcgtttcccgtgcagccgtttttcgtatgtctcatagattttccgaaactgctcatccggacagcttgccgaataatagtggctcaacgggatccgaccgttttttaccgtgctgatctctcttgccagcgattccagcaggtcattttcgtcttccatctgcagggaagaattctgtaaaatctgtcgtaaaatctgatattttatttcttcaccggcgatatttgccgatgtgataccgtacgcctgccggagaataccgtaaaagattccatggaatgtaccaaaagtcacctgacttttttccactccgcacaggtgtaaaaatcgctccctcatctgtcctgcagccgccttggtaaaggtgaccaccaggatagatgaaggagcgacctgataattctgaatcagtttacgggtacggcggataataacttccgttttgccggatcccggtccggcaagtacaagcatcggaccatctttatgttccattgcctgctgctgttccctgttaaactccattctttccctccatatgggaattattctgctgcttttgtcagcttgtaaccgtgagggattttggcagaaccatgccaaaacacctcgcggaatactacctactgcatagttagttcagtttgtcaatggccgcctggattcttacaagactctcttcttttccgagtacttccagaatctctgtggcgcctgccggtgtcatctgttttccggaaagagcggtacggatcggccacatcacataaccaactttgtaaccatgctcttttgcgtaagcggaaagcatctcaaacagtgcatcgttgctgaaatcttcctgtgcctccagtaacggctgtacttccctgagtacctgcagagaagtttcttcgttagttttcatctttttatgcacatacatggatgtctcatattccggtaccttttcaaagaaatccacatgatctttgatatccggaaatacttcgattcttgtttttaccatagcagcgattttgtggaagtccagatcttttgtgatcacttctttcagatacggcaatgccatctcatagaatttttcatcgtccatcttcttcatgtattcgccattcatccagcgaagttttaccatgtcaaagactgcaggagatttgctgattctgtggtaatcgaattcttttaccagttcttccagagagaagatctcattgtcggaagacggactccatcccagaagtgccacaaagtttacgatcgcttcagtcaggaatccctgatccagcagatcttcataagaagaatggccgcaacgtttggacagtttctgatgatcttcgtttgtaatcagcgggcagtggatgtattttgggatctcccatccaaatgcttcatacaggcggttgtacttcggtgcagaggacagatattcgtttcctcttactacatgagtaattcccatcagatgatcatcgataacatttgcaaagttgtaggtcggatatccatcggatttgatcaggatcatatcatccagttcgttattttctactgtaatatctccgtacagctcatcatggaaagttgtggttccttcggttggcatgttgatacggataacgtatggttttcctgctgccagatttgcctcgatttcttctttggacaggtgcagacagtgtttgtcatacacggtgatctcttttcctgctacttctgtcttcaggctttccagacgttctttatcgcagaagcaatagtaagcgtctccctgctcaatcagtttttttgcatatttcatgtacagaccctgtgcctgtctctcactctgtacataagggcctacaccaccgtctttgtccggaccttcatcatgtaccagaccggtctttgccagggtacggtagatgatttccagtgcgccttccatgaaacgttcctggtcggtatcctcgatacgcagcatgaactttccgccttcatgttttgcgatcagatatgcatataatgccgttcttaagtttcctacgtgcattcttccggtagggcttggtgcaaatcttgtttttactgtgctcataatatttcgctcctgttttataatgtaaatgtcccggattgctgtgtgttttgcacacgcacgatccttatcctattcaaggtaaaaggtgtggaattaatcctccacacctttgttttttaagtattcaattatgtctccgacggtttccacatctgacaattcctctgccggaatctccagtccgtattcttcttccagagccataaccagttcaaataaatccagtgaatctgctcccagatcatctttaaatgaggtgtcaagaccaattgtctcaccatcacagttcaactgctctgcaataatctctctcattttttcaagcatatcttttatctccttcataaagcattttcgactttacgcctttgtttaacgaaagtatatctattataaaatcatttgtcaacccattcaggaaaatatgcaaaaaactttgtttctctgttactgttccctctattctcagtaacacgcttcgcagtgcacagaatttatgctgtttcaacctccgtgatatcttctcccgtcgtctggatccttcccgacacactcagggcaattcccatctctgccatcaaaaacaggatcgacgtacctccgtagctgacaaatggaagcgtgataccggttgtaggcatcaggttcaatactacgcaaaggttcaggattacctgcaatgcaatatgtacaaagattcctgtcacaaccagcgttccataaaggtccggcgcattctgcgcgataaaaaacagccggtataacagatacccaaacatcagcagtaataatgccgcaccgaaaactcccagttcctcacacacaatcgaaaagatcatatcattctgcgcctcaggaatcgttcccagcttctgcgcactgttgccaagtccttttccgaaaaatccgccgcttccgattgcgtacagtccctgcagcacctggtagccgccggatgacatattggcctccggatgcagccaggataagattcttcggatacgaaagttatcacttgtagtcatcgtcatacccatgtaagcaatgacacttcctgccaccacgctggtaccgagagccagtacaacaaaaggctttgttttcggatgtgcaataaaaatcataacgacggcgattcctccgataatcataccggtactcagattatccgtaaaaacaaaagccgcacccgcctgtatcataccaaagatcagcagccagattactgccctcaattgctttacctgttttcccatcttgataacaagtataggcatataaataataatcgctatcttggctatctctgccggctgaaactgaatacccagctttaaccatcgtctggaaccataggcttccactccaaatggagtaaaccgcaccatcgccatcagtacaactgatatcaggtacaaagttcctgcgaatggaatcatcagatgataatcccattttgaaataaagatggcaacagcgatcgctcccacactgatcagtgcctgcctgcggaaataatacatatcatctccatgaaatttcatctgtgcttcatacgcactggtactgtataacataatcagcccgaaacagatcagcagaattacaatcgcaagaagattataatcataatatgccccccggttgcttttcttttttcttctttttttctctttttgttccatgtaataccctcatttctttccatgctccccttgagcgtgtctgaaaatgattttcctatatacctcttccacgctccggtatcctgccggaggtttcagccggatatctttgttaagtatatcactattaaaaagagaaaaaaacccccagacatctctttttttatgtttctgagatgtccggaggttctgttttatctaaggagaatgtttactttttattctacatcctgcagtgcatccgtatcttcttcaccggtgcggacttttacgactctgtcaacattgtatacaaagatcttgccatcgccgatatgtccggtatacagaactttctttgcagcttcgatgacctgatcgaccggaatgctgctgactaccacttctacttttacttttggaagcagggttgcatcgatttcaacaccacggtatttctcgccggcacctttctgaacgccacagcccataacctgtgtaacggtcataccggtgacacccagatcgttcatagcttttctcagtttgtcatatcttgacaatttcgagatgataactactttatacataccggtatctgctgctgccggagcttttactactttaactgctgcatttttctgtgcatcagatgctgctttgtaatcatctgtaccaaggtttgtattttcattgacatccatcatcatggtgttggaaacatccatgatactgaatcctgagtaagcagatgccagaccatgttccattgcatccagacctacgatttcctcttcctcggtaactctcaagcctacaacagcacggatcacaaggaaagtgatggtgatggttactacggtccatgatgctactgctgcaaaaccgatcagctgttttccaagaagggtaaatccaccgccgtagaatagaccaaccagatcatcatttccaggtgcggatgtggttgcaaacagaccaactgcgatcgttccccagataccgtttaagcagtgaactgcgactgcaccaaccgggtcatctacacgtaatacatagtcaaggaaccatacaccaaatactaccagcagaccggatacaataccgataatgattgctccgagtgcatcggttacatcacatggtgccgtgatggctaccagacctgccagggaagcgttcagacacatagatacatctggttttccgtaacgaacccaggtaaagatcatacaggttacagttgcgatcgccggagcgatggttgttgttacgaaaatagaaccaagctgttccacagatgttgctgctgcaccgttaaatccataccagccaagccacaagataaatacaccaagtgcaccaattgccaggttatgtcccggaaatgcattgacttttgtgatttttccggatttatctttcgtgaattttccgatacgcggtccaagaatcttggcaccgatcagtgctgagataccacctaccatatgaatcgcacaggatcctgcaaaatcatggaatcccatctgggcaagccagccgccgccccagatccagtgtgcttcgatcggataaatcagtgcggagatcacaccggagtaaatacaataggataagaattttgttctttcagccatagctccggaaacaatagttgcggttgttgcacagaataccaggttgaatacgaagttagaccagtcaaaatctgcataacttgtaaaaatatcaaatcccggctttccgatcagccctaccatatcttcgcccagtaacaggctgaaacctatcaggataaaggtacaggtaccaatacaaaaatccatcaggtttttcatgataatgttaccagtgtttttcgctctggtgaaacctgcctctaccatcgcgaatcctgcctgcatccagaataccagtgcagcgccgatcaggaaccatacaccaaatacctgaccgttcagaacttccataatttcttctgtcatacttttgtcctcctctttctttgtaatgaaaaaagcgaaacaacgacgctttgcttctatatataatataagtaagaagctgcaaaacgccgttgtttcgcttttttcaagccttgccgtatcatcgaaaacagagtgtgcgattttctttgatacgacaaaaggcactacggatgtttttccatagcgcctttgctttgtatgggtgtatcttacaccttagtttctatcctgtcaataaaaattttataattttttatatttgtcacttctgtccattttccataaattattattttaattttctgcatttttactgtacacattctccctgacaatcgcatggttcccgtgtcagcccgatatcaaagctcggattcatctggtagaagttcttactgttcagctgatcctggagagactggagagcttcaccgaaccgttggaagtgtaccacttctctcgcccgcaggaatcggatcgggtccgcaatctccggaatatcccgcacaacccgcaggatattgtcataggtgcttcgtgctttctgttctggggcgaccttgtaagtacaacatatacaaaaatatagagggtaaagcagatattccgcctttccagtgtatcaattcagacgttcagaaatgagcgtctatttttttaccccaaaaacaaaaaggatgtgatactacgaagaaatcaccaccgccggagcgttcccctccgcttccagaccagaatccgaaaccaaccatcaaacacaacattcagaaaggacaggtacatctatatggaattaaaattcgttattcccaacatggaaaagacattcggcaacttggagtttgccggagaagacaaaacagaacagagaagaatcaacggacgcatggcggtactctcccgcagcttcaatctttattcagacgtgcagagggcggatgatattgtggttatcctccctgccgaagccggagagaagcattttgactttgaggaacgtgtaaagctcgtcaatccccgtatcaccgcagagggctataaaatcggcacaaggggctttaccaactacattttgcacgctgacgatatggtaaaagcgtaaggaaaaggaggacatcagactatgagattagcaaacggaatcgtgattgacaaggaagcaacattcggggcattgaaattttctgccctccgccgtgaggttcacctccagaatgaagacggctcggtatcagaagaaatcaaggagcgtacctatgacttaaaatccagaggacaggggcgtatgattcaggtttccatccctgccagcgtgccgttaaaggagctcgattacaacgcagaggtggaacttatcaatccagtggcagataccgtggcaacggctacctttcagggagcagaggtggactggtacatcaaggcagaggatattgtcctgaaaaaaggggctgccatgaatccccagacaccgaagaaagacgctccccctgcaaaataacagctaaataagagaaaagcgaaaggaggattgttcccatgaagcagctttttccccgtggaaaacgtatccgccccacggataaagaccttgtgtcccatactgcccttgccgccctgttccctgtcttcctgctggttgtcctgctgtttcatacagggcagattgccggagccaactggcaggaagtgtccctctcccagataatacaggatgtaaacatcccttacctgttattcagtatgggcgtggcaggaatggtgtgccttacagcagttcttctgttctggcgataccgcagggatgaagtaaagcagctcatccaccgccaaaaactggcaaggatggtgttggaaaacaagtggtatgaatcagagcagagaaaagaagacgcttttttcaaggacttgtcttccagccgttccaaagaaaccatcacttactttcccaaaatctactaccgtatgaaacagggcttgctccatatccgtgtggaaatcactttggggaaatatcaggaacagctcttaaacttggagagaaagctggaaagcggcttgtactgtgagctgacggataaggaattaaaggattcctatgtggagtacaccctactctatgataccattgccaaccgtatctccattgaagacgtacaggcaaaggacggcaggctccggctcatggaaaatgtctggtgggagtatgataagctcccccatatgctcattgccggaggaaccggcggcggaaagacctacttcatcctgaccctcattgaagccctgctccgcactaacgccgtcctgttcgtgttagacccaaagaacgctgaccttgcggatttacaggcggttatgccggatgtgtactacaaaaaggaagatatgctcgcctgcattgaccgtttctatgaagaaatgatgaaacgcagcgaagacatgaagctcatggagaattaccggacaggggaaaattacgcttacttgggacttccggcacatttccttatctttgatgaatatgtggcatttatggaaatgctcggcacaaaggaaaacgccgccgtcctcaacaagttaaaacaaatcgttatgcttgggcggcaggctggcttcttcctgattctcgcctgccagcgtccagacgcaaagtatctgggggacggaatccgtgaccagttcaatttccgtgtagctctggggcggatgtcggaaatgggctatgggatgatgttcggggaaaccacaaaggacttcttcctcaagcagataaaagggcgtggctatgtggatgtgggaaccagcgttatctcggaattttacacgccccttgtgccaaaaggacacgatttcctcaaggaaataaaaaatctcatagacagcaggcagggagtgcaggcggcgtgcggagcaaaagccgcagaaacggactgacctgctgttgctggtgtgccgcaaggcacgccagcatgaacccctcgtatctaacagaggggtacaaatcgacaggcaacaaccaaacaacagggcagaatcccacggtacacaagggattttcccctatccggcgtgtgtcaacaaggctctgaaagttgacatacgcttttttagacaggagggattttcactgaatgaagaaacatgggtacgggacatcaaagagaaacgggaagtttacggtatctcacaaaagaaacttgccttagctgccggaatcacccgtccgtacctgagcgatattgaaacgggcaaggctcacccatccgaagcattacaggaagccatcacggaagctctggaacgcttcaatccagacaatccccttgaaatgctctttgattatgttcggattcgcttccctactacggatgtgaagtatatcgtggaagacgtgctgcggctaaagctatcttactttatccatgaagactatggattttactcttacacggagcattactatctgggggatattttcgttctggtatcgtcggaactggaaaaaggggtgctgctggaactgaaagggcgtggctgccgccagtttgaaagctatctgctggcacaggaacggagctggtatgagtttttcatggacgttctcatggaggacggcgtgatgaagcggcttgaccttgccatcaatgacaaaacgggaatcctgaacattccccatctgacagagaagtgccggaatgaggaatgtatctcggtcttccgcagcttcaaaagctaccgcagcggcgaactggtacggcgtgaggaaaaagaatgtatggggaacaccctgtatatcggctccctccaaagtgaagtgtacttctgcatttacgaaaaggactatgagcagtacaaaaagcatgatattcccattgcggacgcagaggtaaagaaccgctttgaaatccggctgaaaaatgagcgtgccttttacgccatccgtgacctgttagaacatgacaatccagaacggacagcctttcaaatcatcaaccgctatgtccggttcgtggacagggacgatacaaagccccgttcagactggcgtatcagtgaggaatgggcgtggtttatcggggaacacaggggcagcctgaaactgacaaccaaaccggaaccctattcctttgaacgcaccctgcactggctctcccatcaggtagcccccacgttaaagctggctctccgtctggataagatgaaccacacccagattgtccatgacatcatcacccatgcaaggctgacggagaagcatgaaaaaatcctgaagcagcaagccgccgctgcaaaggaggtggtgctttaacggcggcaattttagaacctaagaaatcttacagcaaagaaaggagcttttatgaatttcggacagaatctttacaactggtttttatccaacgcccagtcccttgtgctgctggcaatcgtggtgattggactgtatctcggatttaagagggaattttccaaacttatcggttttttagtagtttcccttgtagcggtcggtctggtcttcaatgcggacggtgtaaaggacatcttactggaactgttcaataagattatcggtgcataggaaacccttgttacacttccgttatggagcaagctctgattgcttcatggcggaagtccactaggggcttggggagcgtaactccccaaaaggagcatgacagagaatggaggtgacactgtggaagaaatgcggatttacattgccaacttaggcaaatacaatgagggcgaactggtcggggcatggttcacgccgcctgtagactttgaggaagtcaaagaacgtatcggtttgaatgatgaatataaggaatacgccatccatgactatgagctgccctttgagattgacgaatatacccccattgaggaaatcaaccgcctgtgtgaaatggtggaggacttaccggaatacattcaggaggaactatcagagctgcaatcctactttggcagtattgaagaactctgtgagcatgaagatgatattatctgccattccggctgtgatgatatggcggatgtggctcgctactatctggaagaaagcggacagcttggcgaacttccggcacacttacaaaactatatcgactatgcagcctatgggcgtgacatggaattggagggaacctttgttgtcacgaaccacggcgtatatgaaatcttacggtagacccgtctgtatctctttcaggaaatacaggcggattttttgattcaggggcggctcttttgctgcccccatcttttagaaaggacggacaatatgaagaaaatacgaagctataccagtatctggtcggtggaaaaggtactctattccatcaatgattttaagctgccattccccatcacgttcacacagatggcgtggttcgtggtatcggtgtttgcagtgatgctcttagggaacctccctcccctttcattcattgacggggcatttttgaaatacttcggcgtaccctttgccctcacttggttcatgtgccagaagacctttgacgggaagaagccttacggcttcctgaaatccgtactggcatatctggtacgcccgaaactgacgtatgcaggaaagcccgtgaagctggaaaaggaatatccggcacagcccatcacggcagtaaggagtgatatttatggcatatccgattaagtatatcgaaaataaccttgtgttcaaccatgacggggagtgcttcgcttactatgagctgcttccctacaactattcctttttaagccccgaacagaaatatcaggtacacgattccttccggcagcttatcgcccagaacagggacggaaagattcacgccctgcaaatcagcacagaatccagcatacgggcggcacaggaacgctccaaacaggaagtgacaggcaagttaaaggacgttgcctgtgcaaagattgacgcacagaccgaagacctgatttccatgataggggaaaatcaggtggactaccgtttttttatcggcttcaagctgcttgtcaatgagcaggaagtcaccatgaagcagtttcgcagggaagcaaagaccgccgtttccgatttcctccacgaagtcaaccacaagctcatgggggattttgtttccatgagcaatgaggaaatctggcggtttcagaagatggaaaaactgctggaaaataaaatctcacgccgcttcaaagtccggcggcttgataaagacgattttggctacctgattgagcatttatacgggcagaccggaaccgcctacgaagattatgagtattatcttccgaaaaaacggtttcaggaggaaacgctggtgaaatactatgacctcatcaaacccacccgttgtctgatagaggaaaaccaacggtatctgaaaatcgaacaggaagacgggacagtatatgccgcctactttaccatcaacagcattgtgggggaactggacttcccatcctcggaaatcttttactatcaacagcagcaattcacctttcccattgatacctctatgaatgtggagattgtcacaaaccggaaagccctctccacggtacggaacaagaaaaaagagctgaaagatttggacaaccacgcatggcagaatgacagcgaaaccagtacaaacgtggtggacgctttagacagcgtgaatgagctggaatccaccttagaccagagcaaggaatccatgtacaagctgtcctatgtggtgcgtgtgacggctcccgacttggaagaactgaaacgccgctgcaatgaggtgaaagatttttatgacgatttgaacgtgaagctggttcgcccatttggggatatgctggggctgcatggggaatttctccctgccagtaaacggtatctgaacgattacatccagtatgtcaccagcgacttcctagctggtcttggcttcggggcaacccagatgttaggagaaacggagggcatttatatcggctacagccttgatacaggaagaaacgtgtacttaaagcctgcccttgccagtcaaggggtaaaaggctctgtcaccaacgcccttgctgccgcttttgtcggctccctcggcggtggaaaatcattcagcaacaacatgattgtctattattccgtattgtttggggcacaggctctcattgttgacccgaaagcagaacggggacgctggaaagaaaccctgccggaaatcgcccatgaaatcaatatcgtaaacctgacctcggaggaacagaacaggggcttacttgacccgtatgtaattatggagaacccaaaggattccgaatcactggcaatcgacatcctgacttttttaacgggcatttccagccgtgacggggaaaagttccctgttcttcggaaagctattcgtgcagtgacaaacagtgaggaacgggggcttttcaaagtgattgaggaacttcgggcggagggaaccaccatcagcaccagcatagccgaccatatcgaatcctttacggactatgactttgcacacctgctcttttcggatggggatgtcacacagtccatcagccttgaaaagcagctcaacatcattcaagtggcggatttggtgctgccggataaggaaacctcgtttgaagaatacaccacaatggagctgctttccgtggcaatgctcattgtaatcagcacctttgccctcgacttcatccatacagaccgcagcgtatttaagattgtggatttggacgaagcatggagctttttacaggtagcacagggcaaaaccctctccatgaagctggttcgtgccggacgtgccatgaacgcaggcgtttactttgtcacccagaacacagacgatttgctggatgaaaagctgaaaaacaatctgggcttgaagtttgcgttccgctccacggacatcaacgaaatcaagaagaccctcgcctttttcggggtggattccgaagacgaaaacaaccagaagcggctccgtgacttggaaaacggacagtgccttatcagtgatttgtacgggcgtgtgggggtaatacagttccatcctatctttgaagacctgttccatgcctttgacaccagaccgcctgttagaaaagaggtggaatgatggtgatacatagaacttccaaccgacagcaattcacagttccttatcacacaaaaaagggcttgtcttggaaaatggcaggaaaagtgattggcagggtgcttctggcactcctgctcatcctcctgctgcttgcagtcttcggcacagccgcccacgctgccggactggtggatgatacggtggacgctgccaacgaatacagcaaataccctctggacaactaccagcttgatttttatgtggacagcggatgggactggctcccgtggaactggctggacggtatcggaaaacaggtgatgtacgggctgtatgccattacaaattttatctggacaatcagcctgtacctttccaacgccacggggtatctgattcaggaagcctactcgctggacttcatttcctctacggcggattctatcgaaaaaaatatgcagacccttgcaggcgttaccacaggcggcttgtcctcggagggattttatatcgggttcctgctgattctcattctggtggtggggatttacgttgcctacacagggcttatcaaacgggaaaccacaaaagccatccatgctgttgtcaatttcgtggtggtgttcgtgctgtccgctgcctttatcgcctatgcccctgattatatcgggaaaatcaatgaattttccgcagacatcagcaatgccagcctgacccttggtacaaagattgtgctgccgaactcggaaagtcaaggaaaagacagcgtggatttgatacgggacagcctgttttccattcaggtcaagcagccgtggctcctgctgcaatacggcaactcggatgtggaaaaccttggggctgaccgtgtggaaagcctgctatcaaccagcccagacgaaaacaacgggcaggacagggaagaaatcgtggtggaggaaatcgaagacagggaaaacaccaaccttaccatcacaaagaccatcaaccgcttgggaaccgtcttcttcctatttatctttaatatcggtatctccatttttgtattcctgctcacagggataatgattttctcacaggtgctttttatcatctacgccatgttcctgcctgtgagcttcctcctcagcatggttccctcttttgaggggatgtcaaagcgtgccattacgaaactgttcaacaccatccttaccagagccggaatcaccctgattatcacggtagcgttcagtatttccactatgctctacaacctgtctggggaatatccgttcttcctgacggcgtttttgcagatagtgacctttgccggaatttatttcaagctgggggatttgatggggatgttctccttacagagtggggattcccaaagcatggggagccgtatcatgcgaagaccccgtatgctcatgcacgcccatatgcaccgtttacagcataagttaggacgttctgtggcggctcttggggctggaacggctgcataccacgcagggaaacaggctggctcagaccagagaactgcttcccactccggctcttccaaacggacacaggcagaccacagcagaccagacgggcaggcagcaccggaaaaggaatccgcatggaaacgggctggctctgcggtaggtgcggtggcagatgccaaagataagatagccgatactgccggacagcttcgggagcaggcaaaggatttgcctgtcaatgcaaagtacgccctttaccacgggaaaacacaggtatcagagggagtacgggattttacttccagcgtgacccagacccgaactgccagaaccgaacagcggaacgcacaggcagaaagccgcagacagaccattgcagaacgcagggcggaactggaacaggcaaaacagccgcaaatgacagcttccgaatcccccaaaggggcggctcctgtccatgaacgccctgttactgcaaagcagacagaagatttccgaaatcgtgcagataccgctcatacagaaaaaccagccatgcagccagcttccccatccatcagggaacggggacaggttccttatgggggaactgtggcagaacggtcttcggttccggtggtaaaggctgcttccatccaccatgaacagacaccgcctgtaagggcagaacgccagatagtccctccggcttccccagacaaaccagatgaaagacaaaaggtggctcccactgttacaccgactgctccccgtccggcaagacctgtccaaaatgatacggctcctgtgataccggaaagaaaacggattacccctgcggtaaaagaatctaactttaccatccggcgtaccaccgccagaaaggagtggacaaaaacggtaacagcggcttccaaacagaagaaaggggagaaaccatgaagttaagacaccttttcttcgcctgttccggcgtgtttgtgatgatgttctccctgctccttttggtggtgattgtcttctcggatgaggaagacggaggaagcggcggaaaccttatctatgggggcgtgagcgtatcacaggaagtcctcgcccataagcctatgctggaaaagtatgcaagggaatatggcatagaggaatacttaaatgtgctgctcgccatcattcaggtggaatctggcggcacgctggaagacgttatgcagtcctcggaatctctggggcttcccccaaactcccttagtacagaggaatccatcaagcagggctgcaaatatttttcggaattgctcgcagcggcagaaacaaagggctgtgatttaaacagtgtgattcagtcctacaactacggcggcggtttcctagactatgtggcaggacgtggaaaaaaatacacctttgaactggcagagagcttcgcaagagaaaaatccagcggaaagaaagtcacctacaccaaccctgttgcggtagagaaaaacgggggctggcggtattcctacggaaatatgttctatgtcctcttggtatcgcaatacctgaccgtggcacagtttgatgatgaaacggtacaggctatcatggaggaagccttaaagtatgagggctggacgtatgtgtacgggggcgattccccctccacttcctttgactgttctggactggtgcagtggtgctatggcaaggcaggaatcgccctgccacggacagcacaggaacagtacaatgtgacgcagcatatccccctgtccgaagcaaaagcaggggatttggtctttttccactccacctacaacgccggaacctacatcacccatgtggggctgtatgtgggaaataaccggatgtaccatgccggaaatcccattggctacgcagacctgacaggctcttactggcaacagcaccttgccggagccggacgaatcaaacaataagaaaggatgaaccgatatgattcagattagaaaagaggaacaccagaaaaagcagaaagaaaagaaactgaaagtttacaaagtcaatacccacaaaaaaactgtgattgccctgtgggtgctgctggcggtgagcttcctgtttgccgtctataagaatttcacggcgatagacattcatactgtccatgaaaccaaagtaattgaggaacaaatcctcgacactcacaagatagagaattttgtgaagaatttcgcagaagtctactattcatgggaacagtccgccgcttccattgataaccggacaaatgctttaaaagggtatctcaccggagaactgcaagccctgaatgtagatactgtccgaaaggacatccccgtatcgtctgccctgactgacttccagatatgggaaatcacagaagaaaaggagcagcattatcaagtgacctatacagtggaacagcgtatcacagagggagaatccggtaaaactgtccgttccgcctatcaggtgacagtctatgtggacggctctggaaacctgacgattatccagaaccctaccatcaccagcgttcccgtaaaatccggctatacgccaaaagcggtacaaagtgacggtacggtggattccatcaccacagaggaaatcaacgaatttctcactacctttttcaagctgtaccctacggcaaccgcaaaggagctgacctattatgtgaatgagggcgtgctgaaacctgtgggaaaagagtatattttctcagaactggtgaatccagtctacaatcgaagcggaaatcaggtgacagcttcccttgcagtgaaatatctggataaccagaccatgacaactcaggtatcacagtttgaccttgtgctggaaaagaacggggaaaactggaagattgtgaaatgattatatattccaatagtaaacagatgactttttatcatctgtttactattggatgtgagataaattcttgttttaattcctaaatctttctataataaaattaaattatcaatctaatttcatattcttttcatataaatgctgtacagtaaaaatggaggtgaatatatggctaaaatattgattgtcgaagatgataaaagaacaaatatggctatttgtgaatatttaaaaccaaccggacataacattgtttctgcttatgatggtgaggaagcattgcaattatttcatagtacaacaatagatttaattgttttagatattatgcttccacgattaaccggaattgctgttttacatgaaataagaaaaagcagtcttatacctgtacttatgctcacagcgattgaggatgaatatacgcaatcacaaagttttgatgaattagcagatgattatgtaacaaaacctttttctatggtattgcttggaaaaagaatcaccgctcttttacgccgctgtggacaaatgcagtctatagacactattactttcggggatgttactgtcaatttttctggatatacagcccatgataaaaatggaagaattgacattactccaaaagaaatagaattattaaaacttcttatagaacacaaaggactggttttgacccgttcacaaattcttgacgaactatggggatatgattaccctattatcgaccggacaatagacacttatattaaaaatttgagaaaaaaattacgtcttaattgtattgtaacagtaaaaggaatcggctataagtatgaggtggtggaatgaaacgattaaaaatattgcctaaaatttttttatatacattcagcattatggtatttattataattgcagctcatctgattttatatttacttgccccacgaattgctatagattacactccatcagtaatatcaaatcaaagtgaatatgtattagatggcagtatcgaccctttgcagtttgtatcacaggcaatttggcaggcgttaccattttctgttttttgttgtattattctttgtgcaatatgttcctattttttttcaaaaagtattacaacaccaattcggaaaatttcaagtgtgacaaaacaaatgtctaaaatggataaatctgctgtttgtatagtatcttctcaagatgaagtgagagaattggctgataatatcaatcaattatattatcgtctatttacaactattaaaaatcttgaagcagaaaaggaaaaggttaaagaaagtgaacaggcaaaaattgattttttaagagcagcgtcacatgaattaaaaaccccagtaaccgctttaaatgcaaccttggaaaacatgattttaggagtgggaagttattgtgattattccacatatcttcctgaatgtaaggatatagtagaacagcttgcaaccatgattcatgaaattttagaaacttccaaaataaatatggaaactactcaggaagattctacgaaatgtaatttatcagacttaattttgaatgtatgtgaaccatataaactgattgctgcgactcatggtatcaatttaaagttagatattcctcaagaatacaggataatgattccacaaaagcaatttagtcgggcattttctaatattattgcaaatgctgtcacctatactccaaatgaggggagtgtttttgtctgtttaaaagaacatactttaacggtagaaaatgaatgtattccgattgataaacaacaattagcacatatatttgaaccattttaccgtcctgatttttctcgcaatagtgatagcggtggaaatggattaggactttacattgtctcaactattttttcatcacttcatatttcatatgaatttttaccaacagaatcacaaaaagggatgtgtttctctatcctcctgccaaaagctctctaatttcagagggctttttttcgccctaaattctatattcatttcatatgcattccatattgaacatttatgatattcctgtattcaaaataaaaaatcaggaggtataaaaaatcatgaactttatgaagagagcatttctatatgtttcacgcaaaagaggaaagagtattttgctttttttcatccttttaattctgtcaacttttgttctaacgggactaagtattggaagtgcgtcaaaacaagctcaaaaaaatttaagacaaaatatcggcggttctttcaatattgatgtcaattattcagattcaaatccatgttatcacgaagaagaaagtgagaatgaagatgggtcttccgaccttttaatgtactcgactgaacaggtgacatcaaaaatggtagaaaacattcggaatatttccggtgttaaattctgtgatgcaacaacggaaagtctgataaattttgataaacttttaccatttgccggaactgttccattagatgaaagtctttctcattgtgtaaaaagcattggtgtatggcgttcagaagaacaaaatttctttacttctggaaaaatccaactaatagaaggcaggcatattttagacaatgacatacacaaagttattctgtgtaaagacttagcagaaaaaaacaacttaaatttaggtgattccttaattgtaacaaatgagaacggaaagcagctatcttttgaaattattggattgtttcatgcacaaaaacttgaaaaagttggagaatcaatcccaacatatgataagatacaaaacttaatttttacagatatagaatctattgtcgaacttgaaaatagtgttgcagtgcaagggtttgatacagtaaaagttaccgtaaatgaccctaaagatattgaaaaaattatagagcaagtaaaacatttccctgattatgaagaaaatgtttataacatttatgctaatgatgaggtttacaaaaacacagcaatttctttagagaatttagataagttagttatcggcttattacttgtaatcattatcgcaagcgttattgttctttcacttattctcacactttggggaaaagagagaatacatgaaacaggcgttttgctctccattggaataaaaaaatccagcatattaggacaataccttattgaagttttaatgatagcaattttagcttttaccttatcttttgttacaagcaatatgatttctggaaatatcgcaaatacccttttgcaacaaaatacaaaaaatgaaaaacagcagctttcaacacaagaagaccatacagaaatgaaaagtctggattttagcgtttcagaagattcagaatccgctactcctgatattaaggtagaaattactttgcccgatatattgcaattatacacaatcggtttttctatcatttttatttcagtaactatatcttcgattagtgttatgcgtttaaaaccacgggaaattttagcccgtatgagttaaggaggaacaaatgtcaatttttaagtgtaatcatgtatcatactcttatgataaaaatacaaacgtgctgaaagatattaccttttcatttgaactaggaaaagtatatgcgattttaggttcatctggttccggaaaaacaacattactttcactactagggggacttgatataccaactaccggaactattttatacgaaaatgaagatattaaaaaaataggattggaatctcatagacaaaatcatgtttctcttatatttcaaaattataatttgattgattatatgacgccgattgaaaatgcaactttggcaacaaagaaagatgttgatgtggttcctcttttaaaacgtctgggactttctgataaagaactaaaacgaacaattttaaaattgtctggtgggcaacaacaacgtgtagcaatcgcacgttccttagctactgatgtccctattatactggcagatgagcctacaggaaatcttgatgaaataactgccgctgaaatcacacaaatattacaggaaactgcccacaaattgaataaatgtgtcattattgttactcattctaaagatgttgctcaaaaagctgatgctgtgttagaactcaaacaaggaatattaaggcaggtgaaaaaatgaaaaaattgattatactaataatttgtttattactttctacttttgtgtttagtggatgtgtaaacagaacagaagaaagtgaatctgaaaaagtttcttacgattacgaaatttcggggcaggaggatatgtcaaatatagaaattgtgccagaaaatgaaaagtaagccaacggaagaattattcttccattcgcttatatttcataataccatccgcaacgctttccatgataacaaggtctgcgtctgtaaaattgtcaattttgctttcaagctgtcttcgtctgctgctttttaccagactatcagaggataaaaagaactcatccactgatacattcagcagagatacaaggtcgtaaagcacctgtaaacttgggtgctgccctttattctcaatattggttaaatagcgtgggtcaatttcaatcattgctcccacctgttcacgggtcaatccctgttttttacgggcttcttttatggcaagcccaaacgccctgaaatcatatttatcttcttttttacgcataatacaccacctctatacattttactgttcctgttataatagtgacaggtatagaaaaacgtattatacagttgtacagttcctattatgcgtaccaaagataaaactatgctgctgaaacggaaaaaaaaaaccgttatttggcagcatactttccctgcgtcaaaaattacatcatcatttccagacgacggtttaacaaaagccgccgtcttttttgcctgaaatgcagatgatttttaaagtccactacttgatacagaaagcggcttacaggaggaagccgctatgcaaaatattttcttaaatatatctacattcggtaagccgttaaaaaaagccatccgcctacactagaaaagtctgaccctcaatgtggtttttcagaatacatagaaagaactatcgaagcacacaagcagaaatatcgtctgtttgcgtgcttttttagttggaagaaaaagtttttaaatttttcttctcaaaacgcaactgaaccccctgtcctgtcgggactaagagcgaaaagggggaaagaagcagaaattcctatcaactcgctccctttcaaggctggaaagggggtgagcaatgatgaagccatctgaatttcagacaaccatagagaaccagtttgattacatctgtaaagtcgctatggaggatgaacgcaaagactatcttaaagcgttgtacagacagtgtaaaagggaaacactgttctgtgatatggacgattataccgttaatctgttttcttccgaagacacctatccatcccacttccatacttttgaaatggatggatttactgtccgtattgaaaacagcctgttagcagaagcgttggaaaatctggatggaaagaaacgtgatgttatcctgagatattattttcttggatttgacgatacggaaatttcaaaaattctggaagtcaaccgttctaccatccagagaagaagacacgccggactggaatttatcaaaaaatttatggaggacgaagcatgacagcaaagcaccctatgattccgtttcctgtgattgtaagggctgcggacggcgatattgaagcaatcaaccagattgtacgccattacagcggttttattgccagccgttccatgcgtcccatgaaagacgaatatgggaatacccacatggttgtagatgaaaccctacgccgccggatggaaacacgtctgattgcaaagattttatcttttgaaatcagggaaccaaactaaaaataatgctcgcctgtggaagcgtggacaagcccatgcttcccagacagggcttgccagtctattaaagtgcattatcaccagtgcattttaacaggctgacaaagccggattgttccttgaaaaagaaagcgtctaatcaacgcagcataaagcagccgaatacgtttcgatagaaagagagccgttgggctggcacgccgtgacccaccaaaggagggatgaaaccggatagcgattcctgccagcgttccataagcagcttaccgcaaaagctgccgccatgacctttctattgtgataatgatacttccgtacagccttagtccgtgtgatgatgtagcaccgctggcaaagggtacggctggatgagaaccatgcaggggtgagattcccatgagctttagcgaaagctgttcggtttgctaaggatgattctttcataatgaacaagcatttttgcatagtctgtaaacataataaagactgtgaggtggaattatgccaaaagaagcagaaatttcctgcaaaaatgtatttaagtgtgaagataagtcggcattaaaaaaagagttcaatcaaaaatggatagaacttatcaatcaattagaaaaatccaaagggcaggtattacctgtaaaatgatagacaaacatttcccaacacggtataataagtgtaggtggaatgtttgttttatcttctctttaagggagataaaatatgatgaacacaaagtcaaaagttgctatttattgccgcttatcagaagaagatagaaacaaacaacatgaaactgatgatagtaacagtattcaaaatcaaaaatccatgctgattcaatatgtattggaacaaggctgggaagtctacaatatatacagtgatgacgattatactggttcagatagacgaagaccagaatttaacaaactgttaaatgacgctgaacaccgaaaatttgatattatcctctgtaaaacacaatccagatttaccagagagttagagttggtagaaaaatacatacacggattgtttcctatctgggggattcgttttatcagtattgtagataatgcagataccgctaataaaggaaacaaaaaatcaagacaaatcaatggtctggttaatgagtggtatttagaggatatgtcggaaaacatccgcagcgtattgactgaccgccggaagaatggatttcatattggtgcatttgctctttatggttataaaaaagaccctgagcaaaagggacacctgattattgacgaagaagctgctgctgttgtaagagaagttttcactttattttcacagggatatggcaaaacagcgattgcccgtatgctgaatgaccgtgggattccaaaccctacggaatataaacggcttcatggtttacgatataagcagcctaccagaaaaaatagtaccttatggaaatattttgctatctctgatatgctgacaaatgaaatttatatcggaaatatggttcaaggaaaatacggcagtgtttcgtataagacaaaacaaaataagcccagacctaaagaggaatggtatagagtagagggaacacacgaaccgattattgaccgtgaactttgggataaagtacaatctatggtagctgaaaaagcaaaaccatttacagtaggaaccatagggctgtttgccagaaaagctcgctgcatgaactgtggctataccatgcgttctaataagcagacagatggaagacattatttacaatgttcaaatcgccatgttgcaaaggacgcttgcataggttcatttatttctgtgaagaagttggagcaggcagttatttctgaactgaacaagttatcacaagaatatcttgataaagatgaattggaacagaacgtggaatttcactccaacgtaaaggagaaaaaaacttctttagaaacacaacttattacctatcaaaaaaagattgaagaagacgcaaaggtaatcagagaactttatcttgataaagtaaaagggattctttccgaaaatgatttcctgaatttgtcaaaagatttcacgaatgacagagaacggcttgaaaagctggtgattgaaacgcaaaaacagcttgatgtaattgagagaaaaatccagacaggcgataatcgccgccagcttattgagcaatacacaaatcttgaacatttagacagagaaaccgttgaaactctaattgattacatattagtaggaaaacggattccagggacaagaaatgtcccgattgaaatacattggaatttctaagttctgtaaaatctggtgtctagcacaccagattatatagaacttctacttaacacttctatgttgcacatacgcagtcgtaccatccgcagccatgctctcaaacatatccgtgatcggatcgcccttggactggaactcacaggagttaaacggaatccctcccgccgactgcggccagatccctacagcatgatccacataataatccgcaaatccctggttttcaatttcttccacagtgaggttagcagtcagctgatgaacgatcgtggataccatttcgagatgtccgagttcttctgtcgctacatcggtaagaaccgccatgcagacacggttcggagcggtgaaacgctgggagagatagcgcatcgaggcaccgatctcgccgtccgggccaccggagttcaatagcctatataggttttcttttaataggaagaaactctttcgatttcaagagtttttttaagagtttttagagatgatacaatatttttaccacttgtgatttgacatgtcaaggaatgtcgcacgatatttcttgtcatattattatcgttatgatattctttatttgcaatagaatatttcagaaatgaagaaaagaggacgatatgtaatgtaccgtcctcttttcttgtgttaattaaacagcttgtaccatgtgttcggtccgatcacaccatccgcggtcaatcctttttccttctggaagctcttaacggatgcggtcagaccagatccaaaggatgcgtccatggctccaaagtaaaatcccttggctgataaaatgaattccgccagataaacaaacgttccagatgctccttttttgatagttgctttcttggctgcctttttgcagctgtccaagaaattcttgtttgccgaatccagctttgcattgtatttccggttgcagacatctttccagatgcacacagctgcagctctggacttttcaccgtattctccatccacattcagtttcgctttcagatatttctgtagtgtagatccataattactattgagccacttctgacctttcaggacattgctttcttctttctttgctgctcctaccggttttgccgttgatccggaatctttcgtacttgtttcataatcaatatagcagaacgatttgattttgctgtcattccaggaatacgtttttaccgcacaggaatcaccgtttctttcatattttctattgcttgtattgccttcaccacattcgaacgttttgttttttgaatccacagacaggactcttcccatgtgagattgacggaaaataacaagggcaccgattttcggcacggttcccagctttcctgcttttcggaacatagcttccgtcgaaaagcagctgtagccgcagtaattcttttctgtcatattccagtgtttcagtgctcctgcttttccgaactcttccagctccatcgcgaactggtatgtcgcacaccacgcttggttctggcatcctgcaagtccggctttatttaccatgtcagaaaatttctgatggtttgtaccggtttccacgtatggcatattgccgtattctctctcttttctaatcatgttattgatgcccatagtatctcctttttttgtcatttcttcgtagatttgttttgaataatcagctctgattgcactcagtgactgccagccatctggagattcgtaatgttccaggacgtagtcagatgcttcctttacattttttgtcgtgcaaagaaatttgaatgttttcggaaacttctttttcagttccaaaactgtgtattccagctgcatatctccatcagcgatagaaacgcctttcttctttgccaactcatacagaccggattttctgtcagatgttgtccattgcgataatccgtatccgtaatgcctacccatcggacttaaaaattctgtttttgatattttcccggaatccacgtattttgtataactttcatccgtgtatacgatacctttttccttatatcgttttacgcaaaggaattccaggcggttcgaaacaaatcctgcggattccgcgtactggtttccttccagtgccgctgcaccttccggtgtcattcctgctgcaacataataattatgtgctttgtatattaaactgttgaacgtaactttcgccatcttctctcctttaaaagaggggcatcaaacccctctgatcattcgttgtcatcttcctggtttactactttgttggccacttgcaatccctttaccaataccttgggaacttccactcccatttcaacgaagttttcgcagattgatcttccttcgttaacaaggaatgatgccaggacaaaccagccaagtaatgtggttacaccgagatccatatctataatctttccaacttccacgaatgctgctgaaaggctgaaacttgcaatgaccaccatccaatatgcaaatttctttaagatcccaatcagtcccgtcttggaactttccgaacctgtgattttggctttaatccatccagtcagccagtcgataatattgagtcccaggaacagtgcaaacaggatccagtgctctccaaggatataagaaaggacggctactgccgccccaaccattgcattgtatgtgtcaattactttcatttacgcctcctctgccagaatggcatttttctcttcttctgtgatccagcctttcgccagagctttctcaactacagatttattttttgttttcgcatacagtcttttgattgtctcgtacataaacatataccctccttctcacagtcccatgatgatttccatggtcagagtgtcaacagtgtcttccaaagatgcaattctctgttctgtcttgtctggtctgatcaaatatactctaatagcagttccggtaaccggaattttgttttttgcttcgtcttctgtataatccacaatagcatcgtacagcttttccacgctctgaagcttcgtgtatccagaatggatcaggaacggatctcctgtagaatccaaaacagtcacttttctggtgttgttggaatcactgaaaagttcgtcatattctgtgattgtcttttctgttgtcagagtgataatcaggctgtctcctgcttcctggataccatctgctacgatattcagttcctgatcgttgctaagtttgatttttcccatgtctttttctcctttttttaaaaataaaatggtttacgagttacgtattagaaccatggctggtctctgatcatatatctcctttctgggctatactccactatgaataggaaaagcaaatcggtatctgttcgcaccgatgcgtccgtgccttactatgctaacgaatttatatgtgttaacagaacaaaggaagatgtaactactccaaatgtcggtacattttcaacaagcggtttatttacgtttgcggaagacatgaccgcattgttcgttgccagcataagtggaagaccagatagtacaggtagaatatggcttaaccttgtacgatattccgacaactacaaatacgattcgaatatcatatatggtggctatgcaacttgtacttttagtacagttatcaaagctaaaaaaggagagcaaattgcaatcggtacagttgaaaaattccaaatgaactcaggtggatttacaagcaatatggctgttattcggttggattaattattatttaagctatgtatataataaaaatatttagcctggttggagtggcaacacttactttagtagttgagtattgccaccatgtaccattattttgaaaagacggtgcaaaaaaactagcattatttgcatcccaatcaccattataagatatgatagttatcttctttggatctactgatggaatattaaacaacttacgtatttccgcaacatctgttactttgatatagttactgtccatggtggctacttttgatattccggcaatccttatcgaaccatttaataatgatacaacacgagtagaattggtatttgctcctattgtgggagatatagctgcttttatttcatctacatctgattttgtagtccctatagtggagtatagttaagtctcggttttgcgccggcgcaattctctccaaatattttcaggcatcacaaaaagacctgccactggcaagtctcaaaaaatgctttttctattatgctgcgtatttatcgtatgtgtttttcacatttttcttgtctacatacacatatacttgtgttgtccggatatcctcatgtcccagaatcatctggacatcctgtagagcagctcctctggtaatcaattcagtagccagagttctccggaatcggtgtggatgtacgttatttactcccgctcgttctccaatgcgtttaactgctgcctcgatcccatttttctgtatcctgttgcttccttttccgacaaacagtgctttgctcccatcttcgcgctctttcagatacctttccaggtacatcgatgcaacctgagtcaggtataccgttcgttcttttccgccttttccatatacaacaagttccctattctgaaaatctacatcgctaatatctacagataccacttctgacaccctgcatccagttgcatgcaaaaaatgtatcaaggcaatgtctctggtatttgtgcatgcgcttttcagcttttccagttcttctccgctaaatggtagccggagcactttatcatatttgatacttttaaccgcccgacatggatttcttggtaggaattcttcatcatggagccagccgaaaaaggaagataacacttttcgcatgttatccagtgtacgattcttaacttttcgctgttccttgtacatcgacagatacaagcgaatatcaaaagcagttatttcatgcagacgccgatccagtcggcttatgaatgtgctgagtaaatctgcatacctcttaatcgtcttttctgattttccttcaattcgcttggttgccaggtactttctcaataacccctctgcagttccatcccgcaccacgatttctgtagaccgttctgtaatttcatactgattcagcccggtaagtaacgcattctgaagaatttccagtgccttgctatcgataatctcctgcatttttaacatcaccgtatttacaatttcatttcgtatgtccatagcagatacctcctgtttttgttatcatcgtaacatcttctggccaatatctgcatatcttttataaactatactccactttaactggtgcaatacacacaaaaacatattcaatgacgttaacggcgaacaactatgtgccaccatttagtatgtttggtgagggtataattccagatgcagacatagagaaatatggttcccctattgcaatctgcgcaattcaaaaatcatccgcaccaggagctgctgcacttagatggcataccggtagatcagtttggcaatatttagcgtgctctaatacggcagagactgatgttaatattacattcatgaagttaagctaagaaaaacgtcttacttccgaacacacttatattagctggcatggaattagaaacttttaagctgacgcttccatctgtaccaatttccaagtaaaaggattcatacagatattcaacaatgttctgttttggtcttgctttttctggaagaatacctaaccgataaccgccccagttcggaaatgtagtagtagtttttccctctattcgtacttcacagataaaagagttgtaaaaacacttggcactaacccctgcattgctacctaagttagcactgagtgtcgtcaaagtggagtttagtgcaagaagctgctccgctactgttgtatctgttccatctgcttttgtatgagtcacctgagtactgtccgtttccagatgatatttgttccaggtatttgctgctttgttaaatattttaaaaggtttctttattgtagccattattttctcctcatcctatccatatagttccatcaggtactccagtcggggcagtatcctgaatatatatctttgttccatcggctcctttgggtccagttgcaccggtatttcctttcggtccttgtggtccagtcgctccggtcggtcctgttgctcccgttgcaccttttgcaccggtcgcacctttgatacatccggtatatacccattttgccgtagcggcgtttcctgccaccgtgcagcggtatgtgttcccagtagatgtgtttagataattatcatttaccaatgcatctgtgattccacttccggtaaatatcgttgcagtcgtggaagttcctgttattgcagttccctggttccaacggctgccgcgcgttccggtagctcctgtctttccctgtgggcccgtggctccagttgctcctttttctccctggattccctggggaccttgtgggccggttgcacccgtcggtccctgtggacccgtagcgccagttgcgccttttgcgccggtatttcccttttcaccttttggtccctgagctccggtatctccctttggtccctgcagatcaacaaccatctgatacccttcaacaaacacgtaatccccggcagacagtgctgcttttaatttaaagcctttgccgtctgtatgttccgtaaatgcaccgccgctctggcgaatccccatcacatacaggctcagggcgttgactcctaccgggaacttgtaatctgtccacgaaaaatccgtctgtccttcggttgccgtgaattctttttggaaaacaatataactctgtgtgcttcccgccggtccctgaacaccctgttcgcctttctctcctcgcggacctcgtggtccggttggacctgtatcacctttttgtccctggataccctggattccctggggaccggttggtccctgcggaccagtatctccttttggtccctggatgccctgtacgccagacagatccacgatgtaggtataggctttttcacccttgcagtacagttttccggtgtccgcgtcctgtacgcttccagtgtcaatcataacaaagctaccaatactcaatccgtccgttgcatatccggaattcatcgctgatacacttttatagatttttttgatctgaaacggttccccggtagcccctttttctcctttcggtccctgaacaccctgtggaccttgtgggcctgcaggaccctgagggccgataacttttcctaaatcaactacactcatgcttcaactccttaatcttcatcgtatatggcaatcagatgcccgtcactgttaatcatcattcgtggagtttttccatccgctccccggatgccttccacggtagcctgtccactggaagatgtcgactcctgggctttttccaagatcgttttctgcgtggttccaaaagtcggggctaccgtatagccattttcgtcaaacgtttctgtggtctccacgatccgctcgttcatatttacaccatattcccggtctattgtcaccaccacgtctcccagatcccattttgtctggtattcggaagcatccacctcggaagaatacgtgtcactgcaggtataatctgccagtttgctttttcctctgtccggaagtgctgactcgtcctcaatgtcccgcgcatccacgaacatctcgtaccgtcccataccagtattctcatcgcctaccgttgtgatcttgcggtcagcaccttccccctgtcctcctacgattgccgtgttcttatactctgtcgtatccgagacatattcccggctgatcacattgtcgtagtccacatcgaagatcatcagcggacgttctgtctggttcgctgaccggtctgtcccttccaggacttcaaagattagcttctgttcttccggattcatcgtgatacagacacccagcccggaggcttcacacagggatgtgatttcttcatccaggttttcatacctcgtctggaaatacaccttgtcgccccgcttccgagacggctttacttccagatatgggatgtttctctttttatccgctgcattcacagcatttgctgtaaccagattgcagataatatcctctgcaggctcgtagaagctgtgatatgccagaccagcaggcgggtaggtgatccgctgcgtcaaaagatggagcaatgtgtatccgctgatcgtaatcggaacaccggactcttcctcgtcagagcattcgattcgtttgatgattcctgtctttttccggtcgttatccagcatgatataatttccgactttcatctgtttggtcagcttgtccacaaagatctggaacgtgccgtattttgtccatcggctgacgaattccagtccctggtaggcatcctcttccccgataaatttcagatccggatcaaaaaaccggatctctattctcctccgatccatatgcttccatccaccaccccttctggctctgtgtcctgaatgtagatatttctccatccgattccctgctgtctggcaaaccactcttcaaaccggcgctggttgtccttcatcgctgtgtcatattcgctgaccgtctttggccggatcacaccgcacacggttacatccggacgttcatcctttaccaggctgactgccccggacttctccacctgatactgtgccagggacagttcgtatatgctttcatttctggtcaatgccggcggtgtggggctgctcgccgcggatccggctcttgtaaccaacgtcaccgttcgattcgcaatattaagttgcaggaaaatgcggtagattttcggaaggttcgtatccggtgtcagcgtcagctctttaacggaatcgttataatgaaaaaagcctctcacgatggagaaaccaattcctacctgtacctttccggaactgatgccaagcgggtactgcaggctctgatccgaatttgcagcaatcccggattcatagatattgtcaaaataccggttaaattcttcctgtccgtattccgcatctccattaaaaaatccataatgttccatgttatactcctatgtatctgtttctgtacctaatctccacgttctgcggatccaatccgttttctgatgcgtactcaatcacattgtcccctacctgtagagagaagaactgggaagccaggtcgatatagtcaaatgcatctgtcctggtgtcgttccggatgatctccacttttttctttccaaacgccgtactgatatacagcacatcgtctgtggtcagctcccgtttgatccggatactttcacccgtggaaagattggtgatcttgggattgaccgccggtccgtggaaatagatctccaccggcgtctctacgtgaccggtattgatgatattcttctgcggttcgccgcgctccttcatcttaaaaggcagggtgaacttccatttccagccacgaacccaggtagcaattgtttctccggtttccagaacatcccggaacatcggatccatgcagattagattcacctgaaaatccagtgtttcgtaaagattgacctcattaattttaaaagcctccacttcgtactcgatcgtacgctccacgcccatataattgaccgtaagtgttcctgaagagaacggtgagaagaatgcgatcagctcctggcgtttcgctgacttctcctcgtcccgtcccagccagtctgcagatatggagatcggtcgggacaggatcttccttcgtttcagtcgttccccgatgtagttggtgttgaccgttttttccagatcgtaatccgtggcttccaaaccggagtaatcggtcacgccgtactccggttcttccaaaacaatggtcttaccgcccctggaaagtgaaaatataatcttatccattatgtccgagccaacctccttgcctctcttctcaataccctgctggtttccacaggtgattccactggctgataaatattgatagtctggtttacttccgtatcccctttcttgtcttctccctggaagagctgtgcgcccttctggaacatccggttctctacaatccctgagattgtagaagacattgccccgcgcatcatactcagaagagacttcgtatcaatccgcatcgaatccgttacgtgccctgcagccttttctactacatcggtatttttcgtcataccgccgccgataccgtaatcgaacatcttaccgatccagtcaccaacacgggacggggaatggatatccaggtttgctttcgctgcattagccgctgcgttcgccactgctgctgcagctgctgccacgccattctgaccagaacggatgccactggcaaagccggcagaaaactgtaatccgatattatgggatccgttaattcctgcctgcagtgcgttctttgcattcagtgccagaccatttccggaacttcttgccgcgccattctggctagcgatcgcaaccgcgaaggcatttccaaaagatgttccttctgttcttccggatgctgccagattgcaagcgctcagtgccttcgctgtactgcttccgagtgctctcgccgcatttccggctgtcgacgtctgaccacggataccagctgtaaatgctgtgaccgcctgccttgcctgactctgtaggttcgatccaagattgactgctttcacgctgttcgctactgttttcgccaggctcagggctgcttttgtcgtgttgccctgtccactggtcaaaccagatgccagctttcctgccgtatcgctaccagtctgtccagctgtctgtggaagtccggatccagacatctgagacatagcataagcatttactgtattcaatgcctgtccgatggatcccatgccggatgtaattccggatgcttcgctgtctactgctttctttcctgcagccgtcgatgcggatgtaacatctgcagaagtaacaccgctgttgatgccggattccagggcgtttctggcactttcctgtatagccggacttccctgcgtgatacctgcggaaaccgcttcggtggcttcctgtgctttctggccggcaggtatggaaacatttgcgcttgtgatcccgctggatagctgaccgattgcttccgatccggttccctctagagctccgctgtctaccaggtatcgttggaatgtatccaggatcccctcaccggtcgtggatgccgcttcttcaaattccgaaatcttgtcctccatggcaaccatcatctgttgcatggagttttccatgtactccttgccttctggtcccatcttctgcacttcattcagtgcctgcaggatcgaagaccggaggctgaccgggatttttccaccggactggtctatctgcatgacagccagctggaagccttctatcatcttagtataatccgtagagctcagtgcgctctggatctctttctgagaggtggctacgccatctgcagcctcactggcatacgttggaatttgtgcatacatatccagcgcttcctggacactttccggtgttccttctgccagttttcccataacctgatccagaccgttgacttccacgctggcttctacggatgccttcgatgcttctcccagtttctctctggttttatccagatttttctgagctttttccaatccggacaggtcattgatgccattgctccagcctttctgcacctgcgcatattcatttagagcatcattatacgctttctgcgcatccgtcaggtttttctgtgcttcgctctggttctggatagcttccgtatactgtgttgtagtcgcttcctgaacagctttctgtttcagagactgaatatattcgtcgatgctccggttgatctcttccagggactgcttcacgccctcattgtcctggataaatccctctgttgtcaggctgtagctagttcccatggcttcattcagctgattcatgatatagttggctgtatcctcacagccctcttttacctttcctgttgaatcaaacgcatcgttcaacccttctttccatttttccaccggtgcaaccgatgcttcgatggaagatccggtattttccatggactctttcaggttgtccagagaacgttgattggactcaatattggaacccagctcatccattttcgtattaaaggcttcctgctctgcatctgcctggttcacagtcgtggcatacaatgccagtccacccaccagtgctgcaatcgcaccggcaatcaataccgccggatttgcgctcataatcgcatttaatgccgatactgccaggcctgtctctgaggatacggactgcagtttcattaggacactgactactgtaccaaccggtccctgtaccatctggaatgtcttaaacgcagccaccagagaaatgacaaccggtgctaccgtatccatatggtctgccagtttcgtgaacagctttccgataatttccagttctttcttggtaactccggaaagacttccaagaccggaaccgaatgttttctttaaagaatccagcgccttcttcgccggctgctgcatttccttgggaagaagtttgatcatcccatcgcacagcgagtctatgatctctctggatgcgtatttcagctgttttttgttcttctggataccctgtacaaatgatttcagcagtaatacagatgcatctaccatcttgggagattcctgtgcgattttcaccgacagacctccgatgatatttccagtcttttctaccgctgcatcgataccgccattctccagcgcactgaaaatctgtcccacggagtccgtagcaccttctgctgcttctttcatgggatcttcgatttcttcatagatcttgattcccagtccctcaatcgtggatttcaggatcgtaattttaccttgcaggttgtcctgcatggtctcagccatttttgccgatgctccatccgctccatagatcgcgtctttcagcttattaaaatctgcatccgatgcgttgacgattgctagcagaccggacattgcctcctgtccggccagggaagatgccatttccgctttctcagcttctgacaatctaccgaaactcttccggagatctcccatcagagtatccagagatttcatatttccatgagaatctgtcagggaaatgtttagcttctccatggcttctttcatttctttggacggtttcgcgagtctggaaaacatcgaccggagtgctgtaccggactggctggctttgattccgctgtttgccatcaatccgatcgccaccgcacagtcttctgcactatatccaagggatcccgccaccggagctacatacttgaatgtctcacccatcatggatacgttcgtgttggcgttactggaagctgctgccagtacatccgcaaaatgcgtggaatcctgtgcagacagcccaaaagctgtcaatgcatccgtaacgatatctgaagtagttgccagatcttccccggaagctgctgccagattcatgatgccgtcgataccattgagcatgtcttccgttttccatccagccattgccatatagttcatagcgtcggctgcttctgttgcggaaaacttcgtggtagcacccatttctttcgctttatcgctcagtctttgtaactgttcgttcgaagctccggaaaccgcctgcactttgctcataccggcttcaaagctggatcctactttgatcgaatacccggcaactcctgccagtgccgtagacatgccggaaatggcggtcactgctgtggcgatcccggtttttgcgatagacgataccttcttcagccctgtctcgattccctttgtatccagtccagtttcgattacaatcttcccatctgccaactcttactcacctctttccagatacggcgtgatgtcccgtccttccttcagtgcctggatcagctcttcgtttctttctatctgccgattttccagcttgtaataccgctgcattgcccggtaataatccgcttgtttcttatccagatccttatttcctgtatcaatggttcgatacaagatcaccctgctcagctggacatcttccggaagatcattgaccatagccaaaaactcccaccagtgcagatatggaattgctcgaagatccagaccgtatacatcatttctccggaaagcagaataaatcatttccccgtcttcgtggaaatcaaacggtgtgttcgaattgattccaaggatccgctttgacggtttatgccgctcatcttctgtcttccctccacggataaaccacagcatctggcgcaccgtttcttctggatccggtggaagttctgtgacaaatacccgtttcaggcatctggcgatatcttccaggctctcatccgcttgctgaagttcttcgtcataacgtaaaatggtgcggaaatccgtatcaatcggatattccacaccatggatattcaggctgtgagggagcggatctgtcaggaaactcatgtctcctccacaacatcatcttccggttccgacagcatgttattaaagcgttttactgcttcatccagtttcttcctctgctgtttcatttcgtctacaagcttcgcgagcgcattcacacagactgttagatcattcttttcgccgcacaccttattcccagtgccttccccaaaaatatgatcaaacgcatttttcgctgatgtacaaatgatacacatgtcatctgcaatatgttccgggcttcccgttgttttcgtagtatcctcaataacagcatcgattgcttcatgcatctttctgttcgtttctacctcacagtagttatattccagttccactccattaatctgcatgatctacctcctacgcttccgctgtgccttctgtgaatttctttgtagacgggtcaaaatggccttctatccagtcacccttgccaagcaggttaccggatccaacgatctcgccatcgttatcggtaaaatctgcaacttcaatggctacttttctttttcttgccggataaccagatgctcccttttcgcctttcagatctacacggatgtattctgtttcagcatcagcaccggttttttctttcctaccgatctgcacgatgtaatcaaccgctttttcctcctcgatcatgtccatttcaaatggagcggaccagtcgtaagaaccaacggattttgtagcagacttgttattcacgtaacgtttactggttgtctgtgcagacgggctgtcatcgattttggaaaagcctgttcccatcagagcccattcctcagtgcttgcgccacctacgtttaagtaatctgcttcctgatatctctgttttactcccatagttatctccttttctgtaaatagataaattcacattgtatcgcataccgggctgtctgtgtctcattgtccgtcatatagccgtttgttgtcgccctgatatatcgtggctctttagactctcccagtaccggaaaatctccattcctggtgcattttcccagccactctgaaaaatactcataaaaatctgatgtatcgatgttttctgctgacccgaagaataccctgctgcaaaaatgaaaagccaccctgcggacggtatcgccatttgcataccgctttataaccggattggccggaactgcttcgatcatgtaattccttggattttcgtccagagtatccacctctactttggccacttctgaaaacatctctgagaattcatccagatacggacatcgcactgcaataaattcccggatcgctccgatcacactcatcctttctttcctccacaaaattctgccacagtttctacgatctcatctccccggtcggcccgcatgcgcttgtcccattctttacccgccagtggagccttgctcctgtttttgcctgagttctcataatattgtcggcgggcataaggctgaccgtaggtaatgtgagttgtatgctctactgccgtctgctgcaacgttcctgttaaatttgggacataaggaatacacagtcttctgacttcatgtgtaaaaaacttttgcccttccccatttttatttaaagaccgtttcagcagaattttctgttcgtcatccatctcaattcttacccttgtcttacccatcatccacctccgatccggatatgtggaatagatccgcaccggttatctgaatgactcaggatcacgcctgccagataaccacggcttttcagctccgtatcccttgtgatctcgtcctcaatgactcccttggcgatcagatcaccgttcgccgctgtccagtaaccggcagtatcttccagcctggcgtactctgccggttccacaaagatctcctgtcttccttcggtcgggacacggatcttgatcacatcggcgctgtttaatcctttgtcaccgacagaaaccttctgatcggtgtaccagtgcacatcccggaggatggttctcacatagaccgtctggcgtgtctttttatcgacccgcttgttgtagatcgttacatctgcatttgtgatcattattcatccaccaccaaatccatcaatcctgtattgctcaaatacacctctgcgattgcatacagcgtctcatcctgtgatttactcctgtcgtatgttacagaatagccgtcattattttctgacgtttttccatcctgtttttcatactggtacgcacattcacacatctcacacagcgctgtttttgcctgttccagccagttcttctcattcatccggtcaaacgtatatcgattcagcctggctctcattttagtttccagagtcttccagcgactctctggtatttgagagccgccgtagctgtcctggtagtattcatatgttacttccatacagaatcctccgtattattcgcctttcactgtgtgaacataaattccggctttcttgttatctttgcattctgcgataccaaccgttctgtaaccgaatttccatgcatctgcatcctggttctgatccggtgtgataattttggaaaccgtatgtttctgatactggatagcggcctgtttatcaacgatgataaagttcatagctttactagcagtatcttttgcaaaaccgccggctccatttgcattcagtttgattttgttgaaaaatcttccttccggaattttcgaaactcctgcgaagccttccattgctttctttgatgctgtggtatccagatcatcgatcattccagccagcaccgggttgataaacagataacaggtacccaaatttgcttctgaattctcgatagcagatcttgccgcacgaattgctgccagtgccgcttttccatctgccagatccgctcctaccgttgttactccggttatctgtgcataagatgcaagtctccatgcgtccagttccgggataacctgggttctcatgaactcactagacagtctaccaaaagcaatgcctgcagattcaatgttatccattgcatctactgtaaacatacgacctctgtcgtaggtacatttcttggtttcatattccagagttacatcaccggcaacatatccggttgttttgctgtaatctgccagaccctgcatagacattttcggaatcagaatctcatttgcatttgctccctgctgtaccagttcgttcggtccgtccagcatggatgtcagggatgctaatttgtacacctcatccagaagtgtagaatactgttttctcagtgcaattatatttggcatatttttctacctctttcttactttgcttccggcagacccatggcagaacggatggaagccagattatcacctccgatatctgctccgccttcgccaccagtaccgcctaccggattgttgatgggttccttcgctccgaacagatatccgtctgactttttcacatcttccaaagccttcttgatatcctcggactggttcttcgattctttcagagtgtccatgtccagcatcgccatgacagctttctcatttcttcctcctgctgcccggatcgcatctttcacagaatcatggaactggcggtctgcttcttttgcagcatattcagcatcctttgcctgcagatctccctgcagttttgtgatctgtccctgcagatctttgacgtccacaccttcaaactctttaagcctggtatttacatcatccagagaggtcttataattatctctctgtgtaacggcattgtcgtactcactttttgtacgataattttctttccatgctttgtcaaaatctgctttcttgtccgctggaacctccagaccaaactccttcagaatctcctgaatgtttttcattgctttttcctcctgaaatcttttattgaccgctctttcagcggtgtgggatatagccggttagacctccggcagggtgtgtccagttttcagccatatggcagggcataaaaataacacgcatcgctacgtgcttatgttctgtcgtactgttttgtttctccgcattttacacatctgcagatatattttctgtccgcaacatcataatgcttccggaatctgtgtttgcagaactttctccggatccagtgatagatcttttctaccagcatgtcctcacctccttgcactggtgcaattctataaaaaatggcacaaaaataccaccggccattattgactggtggtagctacaagactattgctttcagtgctttcttgtattcaatttctaacttacgtttaaatttttcaatctcttctggcttcattcccggttctgctgatgcacaaatgtctggggtttcttctgccaatatttcagttgccctcggctgttccgcatgcattgcatcgtactcatcaactaatgcatcttcaaggataatagaaaactcatatatatcttccggagtattttcaagaaaatcctttatataattcatatattttctaaagaccagcatctgtccattcctcctttttattttttcttcgaacaatactaactatatcaccggagtttttattttttacaactacaagctgtttgcttgggctgaaccaaatcattttctcttctccttcagaataattcggcatagtttttattagaccgagcacatcttcttcgtgaatcacttcatatcctggcttatttaatcttggtaatcgactcaaagcatgaactgataattcttctccttgctctttgaatctatcgtatgcttgttttgatttactcttaaattcttcagaccaatctttcttgttgatttcaagatatgtagaaaacctattctgaagcttttcccacttctcactatcattatatttcacctgcccaaactttgcaagtgatccgatagaatctcccagcacctctttataccgcttatactggttaagatctttctgcatattgtccaccattttctgtggaaacatgcttttgatccggttgtcagtgatcactcttccaagcccatccatatacacccgttccatctgctccggaagttccattttcttagaaaatgcctggtattgatgcagcgtattgaggtatctggcttttgcagccaggatatcgtctttgctcccgtcacctctttcaagattttttatgtaggcacgttggcttctcatttttgtttccatttgccgctgtgcttgagccgcttgataggcgttatacttacaaccgcgatatactttttcttcattttccttttcattcagtttttgaagttgttcatctgtataggttcgtactgaatatcccggtataaatgcataaaagctatgccaacttaccggcaattccatccgcataaaccttctccgctcccgtaacctgtactcgaaacaaaatcaggatattcttctgaaatagccataatatcaccttccttcaaaaaagctgatgccttttcagacaccagctttgtaatttttgttatttaccccaatatttttcttccgcttcttttcttacctttattgcttcctccaatgtttcataatgtcctaaatttattcttactctattcactgttatacttactcggtattttacatgtcctgtacgcattatacgttcctgtactcctgaataccctgtcttgttatctcttctattattcttattatgacaattctccaaatgattcacccatctacagttgtccggagaatatcccttattattgtcaatcctatcaagttccaagctatcggaatatccatttttcatagaccattcataaaaattgacaaaaccgttttttcctttccattcttcgcaaattcgtatcccccttcccccatatcgttcatagtgtgaagctgtaggattttcacatctctgaaataatcctctccacgttttatgtattctcgtcttatacagtccatgaattaaacttgatgtttttcttttttcatctctaaggcaaccgcatgactgcgtaagtccatgcgtaagactatatccaagtatggatttttcttttccgcaatcacacttacacttccacattcttctattatttttactttcgcattgttctatcacaacaagtcttccaaatcgctttccagttatatcatttttcattctttctacctcctcgttcgatttcagctctagctgctttcatcccttgaagatagccaaacttaaaactgctacatattagatcaaacggctgttttgaatatgcattatatatttccatcatgtttaaaaatgtcatatcataatatgggttaattgttcctaccatattttttgtcttcttgattacattttttaccggcatcacaaacactccttccagagagcagttgcctgctggaatccaccctgaaatgctgctgttctttccaaaagcacgcaattcatcatcatttcttcgattctgagatattctttcttgccgatctgtttcgttagatcatcctctaactctttgtacatctcttttaatttcggactatctttctggtcatctgtccagtcataaaacatttcttcaatcttacccatattaaaaaactcctttcaaattttggttcttgaaagaagcttcgatctgcattataatatttacagaaggaaacttctatcctaaacagtcgtggatactttggtcggtgctacgactgtttttatttttttatttctttttctaccagaccaattcctttcataatggtatctgttctggaaattccaagctcatctgcacacttatctatacgttctttttcttctttagtaagacgaagattcagcttttcttttcttgattcaccatttataggcggtctgccagttcgtggggacatatatttcacctcctgacttttgtccttgcataaatcattttaattgacgggcgcgcaaaagtcaagcactatttgttccatttatagacccttccttgccactctctatgagatggtctagctcctatatgtgctgtaacttccacatactcagttcctaaatctctcattacctgttcattaatttgtgcgctcagctgtgaaactcccgttaaaatggctcttctggctgccacaggtgcacggttcttccatccggaagcataatcgataacttgtaatccggacgaactcaattctttgactacacgccgcaggacagtgttgtaatcaaaggatcctgtcacaatgtccatacaggctctgtccaggtatttctggtaatatgttgctaacggggtaaatacaacctttccgccgcccatatccaccgtcattcccatggattgtgtcaggttccggatctcgttttgcgtctgttttacaatggcgttcgaccacttccggatcgtctcgttatcctccagcggagtgaagctcccgttgatctgctcataggccgcccggttccggacgtattcccagtcgcagacctgatcgtacagttcccagatctccggatctgatatttccagaagttctttcaactgcgattcgataaattccgtactgtctcccagaaggagtagtttattgatttggtagtctgccgtgctggtgatcttcttggtctttcggatccggcgtacgatatcagaaaaaatcctgtcctgcagctcatagaagagtttctccacccggatcggcaggctacctttttcttccggtgtcatcatggattattcctcctgtgggttcggcggaaccgtttcgtctacgactttacttttcgcagtagcttcgtcctcgttgtaccacttcatgcggtactctaccagcgacattgctcccatgctcacatcctggcggtcctgctgccgttcagactcttcatccgtcagaatggaatcgttgaatttacacacaaactccggtcgggacatataggttccactgtaaaacgaaagtgctgcaacaaaatcttccagacaagtttggagcttttcctggatcgcggatacccggttgtattttctgttcttggatgtcaacacctccgttgctgtcttttccacctcctgtgcatccgacagatctccgtaggcaagtcctacaataaactcgatttcccgcttgtactcttccaaacctctccggaaagcttcatcccgcatttccggcgaatattctttgtacagctctttatctttaccatcttccagatttaatcctttatacagacgctttttcagtcttggaagatatgtcctgccgcctttgtgcttcagcgctttttcatccacgtggatcgcccgctctccggaatcatattcccagtcaagccgtgctccctggatgtctgctttccggattcttcccttggcagattcaaatatagatacaccgcaggaagatccatccaccttatttttcaccggattctgataatatccaaaatccatctgcgtcattcccggatacatgatcggtcccggctggatctgctgccattcggaaacttccgtaagttcgcatctctggccaatatcgctcttgctctgggagtggaaacagctgttttcgatcgtcagattcccattcgtgaaataatgacgctctaccctcgtatagtagtcattttcccctacacatttcatagacagaaaggctatatcatttggttttccgtcatcatcaaaactgatcgggatcatcttatccgccgcgatgtattcgatcctgtcttttcccagtggccttaataccatggagccaagtgccagaccgttctgcagttccctgttgatatctgacaaggctttttgcaataccgtatccatctcatcgttattcaggatctgtgcatccatctctaccaggacacaatcagcaaattcccggcagataccctcttccaatttcaaagattccacggtatcatcgcaccagtccgcttctcctgccagcatcctcttccattcgttgatggcatcgatcatggtctgcgacagtgccacatccctgccaattatattttttaatgtcgtataactaaacatgctcactatccttccccatagtctctttaatccatcaaacatcttctgcctcctgtatcagcatcttcatatcccgttcgatcgtatattcaaaagcatccaggctgtcgatatcggtacttccatcatccagccgttcatcttttccttttgcttctttatcccagactgcctccgaaaatgctgtttccagcgatttgcagtcctgggtaataaaaagccgcccggctcccatgagcttgacggtacaacggatcctgtccaggattgcttttttctttgccggccggacgataatccatgggaatttcttttctaccgcattccggatagaattgccaaggactgtttccgcgttgtcatagtacacagattccacgttgcagtattcgatgtaatctccatgcctactgcatatgccatatttttctatgacctcctgaacaaattcgcaaaacagcttatccagcatattgctgtcaatgtcttcattttcatcttttgccataattctcttggacatcaggcagatcacttcccggtaatcatccgtataccctctggctacaaaggaatggccggatttgtttccaccaaaatccagaccaatctcaatggatacgatatcttctttccggaactgcttttcttcactctccggattcagttcatccacgacctgacagtagaagttttccggatgatcaccaaactttttatagatggctccttctgcccgcttccacatcccaagaatcagccggtcataataaatcgtaccggcatattccttacaaagctgctccacatattccggtggaagatacggattatcgaaaatcgtgtactcctgcagataaatatccagttctctgttatccaggaactctttcagccagtgtgttggatgttccgggttgcatgctccatcaaagcagctgtacggcttgtccagacgggatttcaacatctggaacacttctttgttccatttggcaatctcatcaccgtaacagtatttgatgctggacccctggatctttgctacctggctgatcttttcagctcccagacagtaagtttcctctccgcagatatgtgccacatttcggttattgatctgcccgatcagcttttccgtgtagatctcacgcatcggctgtagaacgtttcgttcgatagattcctttgatacccccagaatgatattcagaccaggtttcccttttctctcacgaattctgaaaggaacgacaaaggcagtatccacataggattttccagaacgaactgccccggatttaatattccatctgtgcgtggcatttacgatatactcattctgtttcctgcttagctgcattctcccgcacctctttcaagatctgatccaggcgatctaatgcttcatccgtctcattttcaccagtgatatcttcttttcttgccctgttcagctcaacttttgatctctgttcttccagatccgcctcggatttttctgtctggccaaccgtcttcatgatcgcctgatatgcttttacgtttccaagagacgcctgttggatcatggccatggctatgatctcttcataggtgctctcgccaccatccgctcgcaatatatccgataatccctcgacttctgcctgcatcgtcaaaagccggtgcatggtgtctcgcatggctgcttttctgcgtctggtttctccggatttaatcccgccttttttcccacgttctcttgcttccctcttgcttcgtaccggttttaggtttttctcattggccactcacctcaccttcctgtctctttgaattttggtatagaaaaagcaccccggagggtgccttatgtcatttaaaacgcccggcatctctgccaggcgcatacgcatctgcaggtctcagtctggtgtgacctgctgccagatcagctttggcgggttgttgtaccgccatcatcggcgatcggaacaccaggattcgaacctgcagctcgtttttacggctcttgctccctcccgatcggggagatattccaaaggggtggcggttttacaaccgcctgttcacatagaaaggttgaagtttccaaacacagaggaatgattaactaccgtcttaacccatttaccatactagcacttttgaatgggacattggggtacattttgaaaaaatctttgaattcttttcttaacattctcatctgtgtatcgtatcctgcgttttggatacaatgcattcatcctttctgcagtctgtgcataggtcagatcgtcgatgaaatagaatcgaagcatggttcgcatctcgctcttttctactgtctggatgaactcttctgcctgtgtctgcttttccaacaattccacttccagttgttcctgtagtgtaatctttcttttcaattgctgtcgtttccgttcaatcagaccatccggttttcccgtaatttttacacttcccagggattttttccccttctttcctctcgacactgaatcagtcacgatactgttttccagtttccacagttgactacgatccttttctatccttcttcgcagatccttggcttctactttcatatctgcgtactccatcagaatttccttctccaacggtatcacctccccatgacgaccatgaatactttcgtttgctctttctgtctctgaccgcgatattaatcagttccaacccggtaacatccagaaaccttcttaccagatcaagtggctctctgatatgcttcgggatatgttcagtattatgtatcgccttttctgctgttggatccttgtatccttcactattcatctggcacctcccatttacctactgcttttctaacttcatccatctcacacattccaacatctccaatagtaagatctccccagctgcatgtatcgcagtctttccatgacatggtatatgcctttcttgagcaatcgcaaaaatctttaaccatcttttccgtgatcatgacaaagatactgatcttatctgattttgttggaatttgaacaatctttttcatgattaacgcctcctacatccattctctgtgccgagcatcttctctcttcatcgtgatcccgcattcatcacgcagcacctcctgaatatcctccagagtcattcttccagcttcaaagagttcatactgcttttcccattcatcgataaaccgttcttcccggctctttccatcgacttctttcttcatgagcattccaaacttatcatggatgatcagcgttgcaattccaaccaccttcatcaggagttcatccgcgatcagctctgccatatctttcttcatctgctgaatctgggcgattgtcattacacgggttacttctttcttttcctgaccgcgcatctcccggcgtctctctgctctactcatccagaacacctcccgcaatcattgctggctgctccaaagcaatccggtctgcattttggtctatgcaaaaatacctgcatcattcgctgctgccattccgggttctcctgtttccgggtatattccttgatttcttcctctgttgcatctcttggttctccgataatctctatcatttctctttctcctgtctatctatccttcctgtatgaatacaggctctgtggatatacatttccgttcttcttctggttctgatatacacatatttctcctcaggctctatcaactttccgcagagataacaaatatgtgtttccggcttcttctctttctgtcttttcatgttttattcctcttctccatgcagccggtcaatctcatggaacacacaccagatcagctcccgcatcaggtcgcacggatatttctggtagatcagttccccggctgtcattaatcgcaatctatcttcatcactttctgcagcgtgataggtcttaaataatttccatgctgcattaaacatttcgcaatacttcttaagcttttctatctccatcaacatttaccccttaaaacggtatctccatatcttccggatccacagtatgaaatccatctgacttgtcccagccataacaataatccagatcatcattctctccatagatcctcttggacttctcatcatagttgagaataatgcctttcagattgatttttccgaataatcggttcttggccacaattagctttctttgatcttctctgacgattcctttctccagttcttctttatctccccggttgtaacttaatgtgattccggccagattggtgatgtctccggacccgctgacttcatcgttggcatccgtggtataactgttctttctctgatgagcgatcagaaggatcagacagtcatattggattgccagcttcgccagatttctcacgaactgcccctgctgttcataccggtcgcttccccgctgctcatctatgtacatagctgtcatcaggttatcaatcaatatagctctcgcgccatattgctggatggatttttcaatgcttttcagaagatcttctttctcatcattttccacaatccggttatcatagatatatgctttctccctgtaccaggaattgatcagctcctggtttttatttgtgataaaccggttcacctctccataatctgtccggttctccacgatatggtgccggccggcgatctggaaatcaaaccagcttttatacagataatttggtagttctccggaatatgtaaatgtcggatatccctgttcgatcacccttgccatgatttggctggcgaaagtagattttccttctccacgtttcccagcaatcacacagaccattccaaacggaagaccaccatatagcatccgatccagatcggataatccagtttttaccttcggaagcttgtagatattgacgttttccacttctgccaaagggagcactctttgcaccggaatggataccgcattttctacagctttgcggactgcttccggtccatatttctgtaaaatctcattggcatctttgcaatccctgtaatcactttccctgacatgcttgatcctgcatgggaaacgcctggcaacttcgtccagtaatgtgatttgattcttttcgaagtctccaaaaacaacaatctcttcgaacttagctatccagtcataacagtacggcacccaggtgaacccttttgccccagtagggactgaaactgcattttctatccccgctgtagctacgctcaggctgtcaagctgcccttccgtgataactagccgatcaaacttatcattgcactgcttcattccaaacaggatcggtctgcagcctttttcacaccattctttatttcggtctttcatcttatcaaaatctgttttccgatatttgataaaacgcagttttctattttcatcgtaaaacggaaataccaagatattttcctgctgtttcagcgtcgtgatctcgtaccttatagcaacctcgccgctgattcccctggattccagatacgcaacagccggcatttttggcttgatcggctctgctggtgtcttaaaactccggtactgctttttcggtcgataatactcatccacctcatttccgaggctgaaatcaaaatccctggaaagtgtgatcatgtttccagtcactccacaggaggctctcagacacttaaactggccagtttttaaattaatggagaacgtatacacatctttatgtcctccatggcaatacgggcacttatacagatgcatctcatcaccttttacttttattttgtctccatgccatctcgcaaagtcgaaggcatcatctgttttaaattcatatacacccatatcacttacctcttgtcatctcatccagctcccggttcagatcatcgctcactttcatgtagatatgccagatcctgtcatccttgcatctgctctgcacagcttccaataatgcaatctgtttttcgagtttagcgattttctgatcatgattcattctttttctcctgctgcgctttccaaatacggtatgcttcatccggatccatgccttcatcgtcttcttccggaagatcagacgaagcagacgcgggagcgttattatttactttactttcctttactttactttgtgtattatcgactgaattaacttggttttttccgacattaacccggttattgtcgtcattaattgaattatgggcgacttcaactagagagtactcttttttcatttcagctttcttccgttttgcggtgatagacaagtaccgtttttgtattcctctggacgtaaggatctggtatttatcaaagagcttttttgaaaaaatatctctcctgatacaagcctgcactatttcattaattaaacctgggccacaatccgcaccttcttcagacgcgaaaagaagttttttttcttcattccattcacaatagtaaccgtgctcccggtaaatggtttgccagagcttgacgactattgcaaatccttttaaaccaaattcagcttgtatcattttaattttgtcatccatgtagcaatccaaactaaaatagtcgaccccttctttcaaaggtctggccatatctattctccttttaggatcctgacgatctctttccctgtctctttcttgctacaaaattcaaaccggacatggtatctgtcccggattgtgcaaaggctcttgtagagctgctttccatctacggctttctcggaaacgactgttttttgcctcctgccgttgatggtccgccagataattcgatgttttctcgggttttcccagaaatagacatcttccagacaattgataccagctccatgttcaaccaatatcaccacctggattcctgcctgcatcgcgcggatcagctctgctttgaacctttcatgctgctgtgcgacattaccgcacagttcttgcaaatcttttttccggtctatcaccaaccgtggattatccagcgactggtaatctccaacatacaattttgaccggaaatattgtatgccttccatctgatcaaattgtttctgtacccgttcccactctttcttgtgttcacgggtatccacctgaatctgcattcaaatcaccgccttaattaaaaggcagctcttcatccacaccatctggaacattcataaagccatctccggacggtgttgctcccgcaggataaccgttcttgtggtttttgtaagcctgtgtctctgacagctctggaaccgttgcatccgcaatccggtcaacggaaataaaccagcgcagcactcttttctgcagttccttatcattgtaataatccatctgcggaccaaatacaccgccgatcagcttattcttgaactgctgaccaaaattatctccccactgtgttgcaaatccctgattggaatgctccacgcaggtcatgaacgtcttgaaagatctgttgcagtttccatcactgtcctctgtcagaatgtaattcgttgcctggttcggccatttcttatccggccggatatcatttttgaactgttccataaaatatcctggctgtttatcatctggtgcaaaatcgaacagtactacgatcatcggtttcccgtttttggaagttgtctctgttacctgcttgatgatcagcttgtgaccacccagctctacaggggtaaattcccctgctgcctgtgtattatcgtaattgtttggtttgttcattctaatattcctccagtgctttcattacttgtacaatgtcgttatcaatttccttttcttcaaaggcccccatcggtgtttttgctgtggaaaagttcgcctgagtttcaaataaaaatttcccatccacacacttgctcaaaagtaccgtggaaaatttgctctccaacgtgatcttgtccagctttcttccagaagtcttgatcctggtaaacatataaccgttatcatcgtgatcggtctgggtatgtgctacaaagatgatcgtcacatcatcccgcatggtcaatgcatagtcgatcaggtcatagatgctctgtgccagatcctgccatttgtcatagcccttctctttgcaccggcgcatctcatccgcaatcattaatccattgatggtatctactaccactacacggatatgcttgtactgctcttccttatcgatctttttaaaggcctgtaatgcaacctgtggaaaatcagttttcaggtagttctttttctctccattgtactgatttctccatcctttccaggacaaccctttcttgtcacagtcgatatacattgttgtctctggatccagatttctcatggaagtggtcttccccgatccggactctcctgcgatacaaatcactttactcatctgctttttcctcctttgttttaaaataataggtatcctcacctgcagtgctgctttttcgtcccacagattccaagcaccatcctggattttctgaatccgtgatggaataacctatggtttgcaaataagcgattgctgcattaatgatctggatacacgactctgctacctgccgtctattctccatttcgctcctccttcaaaatcgtcgagaccgaagcctcactgcacgccatctcgtccgcgatcttcttattcgaccagccagcccgatgcagcgccagtacttttccacggtctattttctttctgcccgatttcttctcgggctctgcggggggggattgcttttcctcctcagcttcttccattgctggaacaggaagcggaatatctgcagttaccgtctccgactccggttctgaatcccatcctggcggcagttcacactccgatttctggatacccagaagcagacagattgttgaatcaattatccagctctgctcctggacatatcctgtcagtagctccaccgtgtgctgatcacggatcaggttctcatattcatccttggtcacctggaccattctttctttactcatcttcgtcctccagacacttgtattcatcttttccgcattccatccgatccagtgctttctcgaaccggatagagaaaatcgtcaccaatatcagccagatcagtgccggtaaggccgctttgcaggtgaataacccaaatacggatgcgattgttcctattaattctcctgtactcatttgctacctcccggagtaaataagtcatcgagaaacttccacatactttctttcaaaagctgttttttcgcttcatcttccttgtcaagttcctcttcactcataatcgccagtttaaatacatcttccatctctttatctgccactttttttcctctgactttttcgatttctctatgaatatgttttactgcataagtcagctctgacaatacagtgacttcgtctcccatgatttccgcttttacgatgtttcctttaccttctattttaatcatttgcttttctcctcaactttctgtataatattagtggttatttttttgagtgccggaacgggtggcagccctaacggcacttattttttatcctgtttccataggtttgtcctcctttccccgccctcaggcggtcttctccttgtatgtcttttcaaatccgattccctccatcgcctgatcgaccttttgccagaccagctccatagccttctgttctccgatctgttccggagaatacagctgaccgttgatgatgaaccgggtttcaccgatgatcggttgccctttcatgggtaccacctccctgtggtatggtatgtatggtgttgattggttgttacatgttctgatttcttttcttctgagacagaaacttttccacctgtttccactcaggtgaccttgataattcgcaccaatcgtggccgagaagttcgaaagacactagaactgacgaagccttttgattaatgaatctttttttccatgttttaatttcatacattttcttctacccctttactttgtgtgggaacgctctcaccaaataattgtatctctgacaaggatcagcttggacgagctatcgaaacccttgaagaatacgacatcattgaaggcgactatgtaagtggtttcaaaattttgaaattccctgattaaaactgggtttcaaaaatttcatcttttgttacggtaagggtacattttctttctgtgcaattcatggaaaatgcctttaccgtactgcagcgaattccatttaccaccagcgccattgcatctacatcaaacatcactctgtgcaacggataatgaccgtcatttgccggcgtgtttatcgggaagccgcattttgaacaatacttttcgtcttcgtactcttttacttcattaccgcatcttgggcatttcatttctttaatcaccacctattaattgaaaatattttcctgttatgataaaatttcttcataaggaggaacttaagatgaactggactactttcggtcatattgcagatattttaggcattataagttttctattgtcgcttgggatatttcgcaaaatatacaccaaagctgaaattcaaaagacaacatacgcagaagaacgtgacgcactattagcgcatctgatagcacttcaacaaaatatttggaacgatggacttacttctgcagaaatccaagatactttgcagactaaaatgttcgagtatcagatgaaataccttttcatttcatctccacgttgtatttttcatgcttttaggtgtactcatcttttgaagaatggtataaccaattcaaacactcataaaatacgaaatgacataaactttttaattgcacgtttatctaagaaggagtaactattatggacaaagctgaaatttctaaatttattgataaaaccatatccaaaacaaaaaaacacgaattagattggaaagcaatcactaacaataatgttttaaagcctttacccacagaagcgaagacgcttattagtaattattttggcgaatcactttgtacaaacgacagttatattgccaatttccgtactggttcattagtgcttttagttttttcctcaactgttccttcgttgctcactccacccaatggttgtaaactttcgttgcgtatacaggatgaaaagagtaaatatgctgtcgagatatcaaatacatctgacgatgtttttaatgcgcacgcattaatacgcctgtataatttgattgataaggattcacctagtattcaaactttgattgacgatttcctcaatagttgaatatccatctttgtatcctgtgccagcttctttatctgagaggctggcaattttattttctgcctctttcataagaatgagttccaaacgttttatcctgcgttctaactcatcctgctttctacttgcatattcccaataccattttggaatccacatcgtgatcaccttcctattcgttgctttgatggtttgccggagcaaatgtctctgctggcaagccaagcacttcacaaattctgaaatactcttctacactcatctttcgttttccatttaatgttggactcaacatattcattggaatacctgctttttcagacaaatacgaatactttattccgttttcgtctaaatatttcttcacttttaatccaatcaatcttgctcacccctcctcatcctctgtattttccagtaactgttccattggaactttgaaataatctgcaactgctttcagcttatctgctgttggaatagattttttccatttcagaattgtgctcgctgcaaatccaagttcctgctccaatttgtagacagaaacgccttttttgtcgcataacttttttacagctttataaaccatctgttatcctcctttcacatgaactttttcatatttttgttgacttttccatgaaaatattctattatataggcatagtgatagctgaaaattttcatgttgccttttatgataatttttgccgaatcatcatatatagatttttttcatgtgtttcatcgttacaaccacatgatacatgattattttctagttgtcaatagaatttacatgatttttttcatgttgcagaaaggagttattatattgacactagtagaaaggattagagctttggctcggcaacgcgatttaagccttccgcaactcgaagtggaacttggacttggcaacggaactatcagtcgttggaaaacttcttctccaaatactgataagctacagaaaatcgccgactactttaatgtatctatggattatcttttaggaagggagtcatatttgacgcctagggatgagaaagatatcgataaaatactagagcagacaaagacgcaattgctctctcaagaggggcttatgttcgatggcgatccagcttctccagaagcaatcgagtcaattttgtctgctatgcaaattggaatggaaatggctaaaaaaaagaacaaagaaaagtatacgcctaagaaatataaaaaggactgataattgtggatattaagaaaaaggcaaaccatatcgcgcacatatataaatcaagaaatccctttgagataatacgtggtttgaatgttattctcgtatattatcctttggagaatgttcgtggtttttatcagtattttcagagaaataatattatttatttggatgaacgactttctgactctgagcagcaatttgtccttgctcatgaattaggtcatatgttcttacataaaaaatccaatgctatttttatggatactcgaacaaatctgaacactgctggatacgaagctgaggcggataagtttgctatagaactgcttttatcagatactgtattccaagactacattcagtctggatatactcttgatcagattgctcggatcactggatattctaaaaaactgatagaattaaaaatacataaacaagggggactctcatgatttcaaaagaaaaacaaacttggtacctgcaaacatggtttatcgctctcctattctctatatcgtttttagggttcgtttttccattgctacttatttttccagtcgccggaattgcattaatagttcttcaatatcgtgaaaacaagaaattactcgaacaatatggtgagcaggatcgtgttgccgctgctgttgccagcttaaatgatgaatacactatgaaaaaagctgattatcagcagaaacatgattctgaatgtaaggcattggatcagcaatatgatcagcttgaagaaaaccgtaaaaagaaacttgctgatcttgatgcagaatgtgagaatatcgaaaaacgcaatgccaaaaagattcaatcattaaagtctgaaattcaggcgttaaacactgaattgaaaactttgacatctgaaagtgtcgtgtgccattattcattttctgattatgatggattatcttctgaagagtgcaagaataagctctctatcctgaaaactgaagaacaggtactcattcgttctaatgacgcatttattgtttcttccgatggttctaaaaaagagataaatgacaataagaagcaaattcttcgatgctttaatgcagaatgtgataattttcttcttgctctttcttataaaaatgttgattctatcaggagcaaagtttcacgatctttcgaatcattaaataagattttctctgtagacggtatcgcacttgataataaactcttagaatataaactggaggaattgaatcttgtttatacatacgaactgaaaaaggaacaagaacgagaacagcagaaagccataaaagaacagatgatagaagaagaaaaggttcgccgggaaatcgaacgccagaaagctaaaatcgagaaagatcaaacccaatgcaataatgaagtcaaaaaactgcttggatacatgcagaaaacttctagtgatgtggaaaaacaactatacatcgacaaaatcaaggaattggaagataaattaaaagaactggaatctgcaaaagaatccgtattagagcgtgaagccaacgccagagccggttatgtttatattatatccaacattggctctttcggagatgacatctataaaatcggaatgaccagacgtttagaacctatggatcgagttaaagaactcagcagtgcttctgttccatttgaatttgatgttcatgcaatgattttttcagacaacgcacctgaacttgagaacattcttcataagcatttcgaagcacagagtgtcaaccgcgtaaatctcaaaaaggaattcttccatgtttctcttgatgaaatcgaaaaagttgtcaaagagaattataataacactgtagaatttactcgtattccggtagcaaatgaatatcgtcaaactcaggcgattttacaagccgaagccactaactaatttcatcaattgcaaaggtcggaaaggctcccgacacactcacaagagtacctgagatgatggatacgccgcccatcttgcaattgacaatacatttttctaatggtaagatagtaaaaagaaatggtcgttgtttagatgactagcaaagatccctcttaccgttttcggaaggagggattttttctttatacaaataaaaaccggctcctgacggcaatcaggaaccggcaagtaacattccgaagaatgataccctaactcgcaaaaatattgtatcatcttcggagcagctatgcaagcggaacacccgttctctcgctggctgttatttttgtactcatttttacataaaacaaaacaggaaggtgatattatggcaaagttaagaaatggtgccctctatatccgtgtcagcaccgccgatcagacggagctgtccccggatgcacaacagcggctcttactggattatgccaagaagaacggaatcatcatcagcaaagactatgtcttcgaggaatccgtctccgggcggcatgcggataagcggccgaagtttcaggagatgatcgggatcgcaaagcaggaatctcacccgctggatgtgatcctggtatggaagtactcccggttcgccagaaatcaggaagaatctatcgtttacaaatcactgttgaaaaagagtaatgtggatgtgatcagtatctctgagccgctgatcgacggtccttttggtactctgattgagcgaattattgagtggatggatgaatactactcgattcggctgtccggagaagtggtccgtggcatgaaagaaaaagcactgaaacacgggtaccagactacaccctgtctcggctacgatgccgttggcggtggaaagccatttgtgatcaatgaagaggaatacaagattgtccagtacatcatggatcagtacgatctctatgatcaggatgcaaccgctatcgccaggaagtgcaatgacctgggcttccggagtaagcgggggaacctgttcgaacaacggaacgtggatctcattctgaagaatccgttctatgccggcaccgtagtctggaatgggatctccttcgaaggcagtcacgaaactaggctgtcaaaggaacggttcgagaaacggcttgccctcatgagagcccgcaagcgtcccgccaaggcacgaaacgtctctgcctgtaagcactggctgtctggtctgctcaaatgctctgtgtgtggctctacgctcgctctggctggttccggaagttacaagtacttccagtgctggaaatactccaagggattccacaagggatcccagtcgctctctgcggcaaaagcggaagctgcagtctgcgattactttgaccggatcctcgccggagctgacttcacttatgccgtccggaacattcctgatcagaaagaaaacgatgagttggaacttctccatcaggaactggatcagatcgctgtgaaagaagccagagtaaaactggcatatgaaaacgggattgatacgctggaggaatacaaagagaaccggcgccgcctgaaggagagccgggaagaactactggaaaagatcgatgtcgccactgctgccacgcagccggatgattctgacagccatgccagggaaacgctcctgaaagagatccagtccgtcagtgagatcctgaaggatccggccgaatcctacgagcggaaaggtcttctgctgcgctcgatcgtggacgggatcacctacgataagaagaaaaaccggctgtattttaactttttcatttcatgaaaaatcgccgggaagccccattttataagggtttccggcgatttgtagggtattgcaatctgggccaccgtattgtgttgcaataatcttcgcgatccgtgcatccgttttcgtgatatttaccggatattgcaatcgtttttcatatatccacatacactaacacctgcctttcccggatctttcccatggccatggctgcatcatccattcccatgaatgacagtcggtctcatcgatcagatccattgtcaacggtccgaaacgtctggcatattcttccatcgcttcccggcgtatccctgcctgtttatggtagtatgccatggcctcctgatcctgtgggtgagtatccatataaagcagagtatcataagccgcaaatgccgactgcccgatggtttccatcagctgtgctttacttcgttctccctggcaggtacagttatttcgtcccatcatcgcctgcatccgcctccttttccacaaaatggtttacaaagttccgggaaaattgttccgagctgaaatccacgggcaggttcatatacctttccgaatttctgcattggcacatatgccattgccagcggaagcttctgcaaatgttcctgtacggatgtttcctgcatacaatcacatatatttgtgcaggttttactggtagaatccatcggaatcatcgattctctgtttcctgtcatattgccacaggtccggtttctgcaattaccggaaacattccggcaattcatacgataagaatccattctcttctccttacttctgagttttgtttctctttatcatatgaatgtgtgcaaattttcgtgtttccgtcctgttctacttcgtcttatttatgatacagtctcctaccatatccgctactgccagtgctccgtctttgttcagacgaacaccgtcttcctgataccattccggatgtttctgactgtagctgtaaagatccagaaccgtcagcttattcttttcaccaatggtttcgatcgcatttttgatttcttctactctttttgccctctcttccatctctgtgcttccatcagactgtatcatcggcggcgtgaccagccagatttccggactgctctttaaatcctgatagcctttgatcagggattgataatctttctgaaacgtatcgatatccgtccagttttcctctgtagtatcgtttgttccaagcatcataacaacaagacctgctttatattctgtactgctctcatagcgttcttcctttgtatacggctttttactctttttctgaaccgcagcgccttccacaccgaaattaccgatccgatattttttttctgcctgttccatgtatttctgtaactgtaccgggtaacagttatcttcccgctcttccacagcagttccaaaagttaattcatcccctatacatgccacttttaatttttgctgatccgctgtattttgcatcagattccagaaaatcaatacaactgctaccagtccaaaggcaacagcccgctttttcttcttctgttgttccatttttctgctcctttctgctactgtctttttctattttgtgatatctttttctttctgtcaatttcattaaaaaatactgtcattttttacaatagattttacttttctccatcgattttctccatattgtttcttgcattttttctccatgactcttagaatacgtatggttactgatttgtaatcatttcacttttatatagaaaggattcctcatggacactactgtaaaggcaactgccgtatcaggtcatcagcgtgaatatctgtttgacaattataaagtattattgattcttctggtagtcatcggtcactttattgaaccgagcaatgatcagaatccgttcctctacgaattaaaatggggaatcgtagcgttccacatgcccgcttttatctttatttccggatatttttccaaacggatcccatccttaaaaaaaatgctttgtggactggtcattccctattttgtatatgagattctttattatcttttatacacctttatactggacaaagagaccggcttttattttacaaggccgaaattttccctctggtatctgatggcactgttcgcctggagactgttgtctcctctgattgagaaaattccaggctgcatggttttgtcagtcattgccggacttcttattggattcactgattttgggaattttctttccattccgcgtattctgtttttcttcccgttctttcttgccgggaaaaaatttgattcttcttccctcgcacgttttcggaaccggaaggggtatctgtgtgcgttgaccatcctgggaagttttgccgtctttttatttactgacaagtaccatcaccgtctggatcagaagattttctatggacgatactcttacgcagatatggatatgagttccgtcgaaggcgtacttgtccgcatcggctgttatctgatctcttttcttctgatctacctgttcatgctggtacttccgaccgaaaagaaatcctactcttatctgggagagcgtaccatggcaatctatatctttcacggtttcgtctacagctgcctcaaatacggttcttctattctgacttcggttgagagcaatctggaatgtctgtatctgctgacattctgcttcttcctagtgtggtttttatcaagaaaaccttttgtattatttacaaataagatcgcccatcttttctgatgcgcgatcttattttaatttacgctagagcgtgtttgaaaaacattttaagttgttcattttaaccaaattaatattgagacgatgcataagaaccctaggtaagtgaatgctaatttgtcataacgtgttgctatccggcgaaatgctttcaattttagaaagtaattttcgaccagatgtctttccttataaaaccaccaatcgcagcgacgttcaaatttagctcctcggcgggatggaatggttggttcaccgccatgatcgtaaatgtaatctatcaattgattactgtcgtatccacggtctgccagaaccttgcttccatctatttcgatatgatccagtaaaggaattgcataattgatatcattacgctgcccttcactgatcataaaatacactggatagccataagaatctactattgcatggattttggtactggctcctccacggctgtgtccgatttcattcgaggccccccttttttagcacctgcgctatgttggtgagcctgaacaatggaagcgtctatagataattcttccagttcagcctctaggcttagaatgcgaaaaatattatccagaatcccgtcatcaatccatttacgaaaacgactatatacagtttgccaggaaccataacgttctggaagatctcgccagggtgcaccactgcgtgccaaccagaccatcccattaagaaggatgcggttatcttttcgtggacgtccctgttttcctgtattttcaggagggagtaatggtgcaatacggttccattcttcatctgttaactcatatcgtctcaacatactgaacacccctttttctttattttatcatgaaaaagggaaatgcaacatttggtttgtgcaatttttatttttcaaacacgctctagagcgtgtctgaaaaaggcttttcgtgagctgcgagtcccaatttgtgggagattttatccgaatgagggcggcgtagcgggctacggcaaccgaaaattagtttccacttttctgcgcttcaatctgttccgccagatcgttgagatacacccagcgatccattttttcttccagctgtgcttccgcagcttctttttcccgcataatttctgccagctttccggaattcgtcgcattttttaccatatcgtcgttcagcttttcgattttctcctctaacactgctatatcatcgtctatggtctcatactctctctgttctttataagtaaacttcaatttggtcggtcggttctgcttccagtcctttccggtagatctttctttcttctctttttctccacccggcacactggatatcactcccgtctctccaaatcttcgctctttcgcttccctatagtccgtataaccgccctcgtactgacgcagtgttccgtttctgtcaaattcaaagatgcgatccactacattatccagaaaatacctgtcatgagaaaccgtgattacaataccggaaaatgcattcagataatcttccagaattgtaactgtcgggatatccacatcattcgacggctcatcaagaatcagtacatttgccccgctgaccagcacggacagcagatacagccgccgcttttctccaccggagagtttggaaatcggagtgtactgcatatccggcgtaaacaggaaccgctccagcatctgcgacgcactgattctgccgtctcttgtctgcacatactctcctatctctttcacataatcgatcactcgttgattactgtctttgattggcagctcttcctgtgccaggtatccgatcttgatcgtctctcctacttccacatgaccttcatccggctgttcaagtcctgccataatctttaacagggtagattttccacaaccattcggaccgacgattccgagacgctgatttcgaagaacagtataggtaaaatccttcagaagcaactgatcaccatatcgtttggtcacattatacagctcaattgttttcttacccatccgggtttctacagaatccatctccacaaccgcatcactgattggtgcttttccctgttttaaggcttccagtcgatccagtcttgctctctgtttcgtgcttctggcacggcatccgcgtttcgcccattccagttccatccgaaggatgctctgacgcttccgctcactggcaagttccatctcttctctctccgcctttaactccaggaaccgagagtaattggaatcatacccatacatatttcctcggctgatctccagaatccgattagacactttatccagaaaataccggtcatgcgtaaccatcaccagcactcctttatatcctttcagatattcttccagccagttgatcatcccttcatccaggtggtttgtaggctcgtccaacagtaacacatcaaaatcccccgccagcaccttcgccagcgcaagctttctccgctgtcctcccgaaagattctccacctcctgctccgacacttcgattccaagcttcgtcatattactctgcaccaaccagtccttatctccattcccgctcagcacatacgaagccaccgtagcccccttcggaaaatgcggattctgtggcagataagcaatcttcaatccattctgccgaataatctgtccctgatccggttcctcctcccctgcgatcatccgcaacactgtagacttgccggtaccattaatccccacaataccaatcttatccccctgctgaatcccaaacgaagcatcctcaaaaataaccttctcaccaaaaatcttactgatatgctcaatattaataatattcatccaaaactcctcatttaccataaaatatccataacagcactatcttaccatccttccctcatataatcaaaccctaatccacgaaatttataatgtacccatagcagtggacacatgcattaatctttctccttccctcccacgttttcaaaacttccagttctttttccagtttctcccaaaatccagcaagtagtcaggactccaggggcagcaaacactttgtgggcgcttagggcaagctttaagatccgacgcttacgtaggctttcgcgagggtcagctgaccctcgtgaactatagccgaagttagcggctagcttaaagttgccctgcccacgtttgctgcccctggagtcctgactacttgcgtcccccctaccaatacaaatcaaaatgctccaccaaaccaactgttgatatgcaacacaacaagctaaaacacatttcgcaaattttactcattatcacgccagtcatcgagatctcatgcaggcacaactttgactcgctgctcgtgtaaaaaaaaagccccacaagacttctgataaaatcaaaaatcttgtgaagctccctataaaatggaatttcacccgatcttaaaccggataagccccattcttactatccgctacagtagcatcaaccttagtctgctgagcctctctatatttaaagaagtcagtagcaacctgtgggaacagagcgtaagacagaacgtcttcatcctgttcagaccactgagccatctcgccacgcagagtatccagttcgtccgggatcagatctgcaggacggcaggtaatcggttctttatcgccgatacatttcttctgaacctctttattgaacggtttaacagtctttccatattcaccggaaagaacagccttagtctcttttgtaaccattttgtatctttcgcccatcagcacgttaaatacagcctgtgtaccaacgatctgagaagacggagtaaccagaggcggctcacccaggtcttttcttactctcggaacttcttccagaacatcgtagaacttatcttctgcattctgttctttcagctgagatgtcaggttagacagcataccacccggtacctgatacagcagagttttgatattaacacccaggttcttcggattcagcagaccgctgtccagagcctcgtcacggatcgggcggaagtagtcagcgatttcagccagaagtttctgatccagacctgaatcatatggagtacccttgaaggtttctaccataacctctgtagccggctgagaagtacccagcgcaaatggagagattgcagtatcgatcacatcaacaccagcctcaacagctttcatataagtcatggaagccacaccggaagtataatgtgtatgcaactgaatcgggatcttaacagtctctttcaaagcttttaccagttctgttgctttataaggaagcagcagaccagccatatctttgatacaaatagaatccgcacccatctcttcgatctcttttgcaatgtttgtccagtattccagagtataagcatcacccagtgtgtaagacagtgcaacctgtgcatgacctttttctttgtttgctgcttttactgctgtctgcaggtttctcatatcattcagacagtcaaagatacggatgatatcaataccgtttgcgatagatttctgtacaaaatattctactacatcatctgcatatggacgatatcccaggatgttctgtccacggaacagcatctgcagttttgtgtttttgaatccgtcacggaatttacgaagtctttcccatggatcttccttcaggaaacgcagggaagcatcaaatgttgcaccaccccagcactctacagaatgataacctactttatccatagtatctacgatcggcagcatctgctctgttgtcattcttgtcgcaatcagagactgatgtgcatcacgcagaattgtttcagtaattttaattggttttttagcaatatctgtcatagtcttatcctttctttctattatacccgactgcggacatggcagcccgcatcgggatctgtggcttttgtattaccgtattatactccgaatacagccatgaaagttccggccgctactgcggtaccgataacacctgctacgttaggtcccatagcatgcatcagaaggaaattggtcggatctgcttccgcaccgactttctgggatacacgggctgccataggaacggcagatacaccggcagatccgatcagaggattgatctttccaccggacaatttgcacatgatcttaccaaagagaacaccaccggctgtaccaacacagaatgcaaccagacccagaagaacgatcttcagagtatctacgttcaggaatgcttctgcgcttgtagatgcacctacggaagtacccagcaggataactacgatgtacatcagcgcgttggaagctgtctctgtcagctgttttacaacaccactctctttgaacaggttaccaagcatcagcatacctaccagaggagcagttgtaggaaggatcatacaaactacgattgtgataacgatcgggaataagatcttctccagtttggataccggacgaagctgttccatcttgatctttctttctttttcagttgtcagaagtttcatgattggcggctgaatgatcggaaccagggacatataagaatatgctgccacggcgatcggtcccatcagttctgtctggcccagtttacctgcaaggaagatagatgtcggaccatcggctccaccaatgatagagattgctgctgctgcttttccgttgaatcccaggaaaatagccaggaagtacgcgctgtagatacccagctgtgctgcagcaccaagaataaaactcttcgggttggcgatcagcggaccaaagtctgtcatcgcaccaacgcccatgaagatcagggacggcaggatactccactcatccaggatgaagaagtaatgcagaagaccaccggcatgttcgatacccatagcatctacgtaaggatctgccataatatccggatagatgttaaccagcagcataccgaatgcgatcggcaccagcagcagtggctcaaatccgtgtttgattgccagatacaggaataccagcgcaaccaggatcataacatagttgccccaatccaggttcatgaacgcagtctgttcccataagtttgacaatgtattcattatactcatgtttttaacctcccgttgttgaattcagcaagtcgtcgctgtttgggaatttacattgtctgcaaattcagtcttagtttaaggatgccagagtagcaccagcttcaactgcatcaccaacagcaacgtcaatgcttgcaacggttccgtcctgcggagcaacaaccgggatttccatcttcattgcttccaggatgatcactggatcaccggcttttacagcctgtccaacgcttgcttctactttaaatacttttccggctgctccggctgttacttttacagaaccagcggaagctgcaggtgctgctgccttcggagctgctgcaggtgctgccttcggagctgcaacaggagctgctgcaggtgcaccgcttgtctgtccttcttcaacagttacattgtatacattgccattaacagtaatagtatagtttttcatgtgatattcctcctatgctcaggctctctgccatttacttctgtttacttttttaatggaacgaaccacaaagctgtctgtggatgtgttctcagatgcagcgattgctgcggaaataactgctaccagttccagatcatctgtcaggtcttcctctacaggtgctgcaacaggtgctgccggtgcaggtgctgcttttggtgctgtttctttctgtccgatctttccaacatacttaaataaggaaataacgaaaatcaggaagatcagaacaacgaatacacagccaacacccataacggtattgacagcggcaccgtttaatttcattccggtcgtttcaacttcggaaatagtcatataagcaggaaccatctggtcataatcactgctgtaattgaatacaactttgatttctgcattacctttgtcaaattttgccggaatatcaacagttacctgtccttcttcacggtcaatatctgttgtcggggttcccatttcctcatatttaccaagttcgttttcctggtccatccatgctgatactgcaagtctggtaaatgtgtctctgtttgcagtcatctgattcagagtttcatcatcgaaacctgcaagagattctactgcactctgagatacctctgcacagttgcttaccatatcatcggtaatctgctgataagcagctgtttcttcttttttaccgcaggcagtcagagaaaatgcacagattgtaaccagcatcagactggcaatttttttccatctctgcttcatttatgctcacctcattatactgttccgtgttttttgcttggacgatcctctctctttgtgtaaagcatttcgaaagcaccgatcacatattttcttgtatcctcagcttcgataatagtatctacatatcctcttcttgctgcggattccacgctggactgcagggttgcatattcagcagctttctcgttgatggtagctgcatcagaatctgcgtacatgatctttgctgccagttttgcatccatcattccgatctcagcgtttggccatgcataaaccatatctgctccgatagatttgctgttcatagccaggtaagcgcttccgtaagcttttcctacgatcacgtttactttcggtacagtagcatctgcgaatgtataagtcagttctgcaactgcttttgccatgtttgcctcagagcattttgttgctttgaatccggtaacattggtcagtgtcagaaccgggatgttgaaagcgtcacagaattttacgaagtctgctgcttttcttgctcctcttgcggataatactgcatccatggtttctgtcaggtttccttctgcatcgtagatctctgttctgttggcaacagcacctacagtggaaccgttcagtttgatgaatccacaaaccatatcttttgcatagtctgcttttacttcaaagaatacgttgttatcgctgatctgagacagtgcgatagaagtatctcctgcacagtttgccagatctttgcatactctgttcagatcatctgtgcattcttcgtaagacatatcatcttcgttgtttgcaggaagcatagttaccagcgcacggatctgtgccagaacatcttcttcgcttcctttgaaatctaccagacctgcttcttttgcctgatatgcagctgtggaagtgtcacatttggagatttcatttccttcgatggcgtttggagaattgacaaataattttgcttttttctcttccatcagagtaaagtctgtcagtgccggaatcatagccattccgcctccacaggttccgaagatacctgtgatctgtggaatcacaccgcttgcttttgtctgctgcatgtagatctcaccgaaaccgttcagtgcatcggttgcttcctgcagacgcatacctgcgcaatcgatcagaccgattacaggtgcacctgtcttcattgcgaaatcatacagtcttgcaattttctttgcatgcatctcaccaacagttccgttcagtacggtagcatcctggctgtatacatacaccagactgccgtcgatcacaccatatccggtgataacaccatctgacggggtttcttttgcagataagttgaaatctgtacttcttgcagtaatctgtccaccaatttcaacaaaactgtttgcatcaagcaaagaggctatccttgtgcttgctgcgctttgtgctgtattgctcatacttcagccctccatttttataaaaaatttaagtgaaaacaaaatttcagccgattataattctactattttttgctttttttttcaataactttttgacaaaagccttcagaaaaacttaataaaggtacaaatgtttcggaattccgttttcgtagattatttctgtctcaccatggatcaacggttttaaatattccatcatcttttctgtcacatcatttcctgcctcattaatataatcgtccgggacttttttctcctggttagacacttcacagacaggaactgcagtatagcgtacctgatatggatgactgccgagtctctccacagaagccatcagtccgctttttccctgcaacgcacagcggcaggctgtcatacctagcatcttcgactcctggatatctgttttactcgcaatatgggaggcgcatcgctgcatcagattcagttcgatggatcttactttgcagccaatctctcttctcacaatgtcttccaatactctggcacttcctgcgatataactgtgtccaaaattatccacggccccgctttgtacctgctcggagatataaacaccatttttatccttgattccttcactgatcgctaccagtacgctgtcctgctgttccagttttttcttcacatcgtcaagaaaactttccactgaaaaagccggctcacaaagataaatcaggctcggacccgctgcaccgttatttcttgccagtgcagatgctgctgtcagccatcctgcatttcttcccattacttccacgatggtaacagccttggtatcgtatacatgacagtctctttcaagttctgaaaatgtagttgctatatattttgctgcagaaccaaatcccgggcagtgatccgttcccaccagatcgttatcgatggtcttcggtgctcccataacatgaatatcttcaattttgtgttctttacagtatgccgccagtttatctactgtatccatggaatcatttccacctgcataaataaaatacataatttcatgtttgcggaaaatccggatgacttcctgaaactggctgtcgtcttctgccggatttttcagttttaccctgcaggaacccagtgctgctgccggtgtctgacaaagaatctccagttcatcctcaccgggtactttctcgctcagattaacaaaccgttcttccagaacacctttgatgccgtttaccgcaccgtagatcgtatcaacctgatcggatgcatgcgcttccatgatcactcctgcgatcgtcgcattgattgctgatgtgggtcctccggactgtgctactaaaagatttctcattgatttcctccttaagaatgcataaagaaagggatgttctttgtgtcatcgcaacatcccctttttttcttacctgtgattttctgctgaaaacctcatggtcagcctgtactcatagattttatcctaccttctcaaactgactattatatagattagcataaaatccgttcattgccaagagttcttcatgatttccctgttctattatatctccgtctttcatcacaaggatcacatctgcatctttaattgtcgataaccggtgagcgattacaaaactggttcgtcctttcatcaggttatccattgctttctgaatcctctcttcggttctggtgtctaccgaagaagttgcttcatcaaggatcagcagccggttatctgcaagaatcgctctcgcgatcgtcagaagctgcttttgtccctgtgatacattgctggcttcttcatttaacacggtgttgtatccttccggcagtgtctggataaaccggtgtgcgtgtgctgctttcgccgctgcgatcacttcttcatcggtggcatccagtcttccgtaacgaatgttttccatgatcgtaccgttaaacagccaggtgtcctgcagcaccataccgaaacactctctcagatttctccggtcaaattccctgatatcgtgtccgtcgatcagtatccttccactgttgacatcatagaaacgcatcagcagtttcaccagcgtggtttttccggcaccggtcggtccaacgatggcgattttctgtcccggctgtacctgttcagaaaaatctttgataatgatctgatcaggccggtagccaaagcttacatgttcaaaggttacttgtccttccacaccattttccagtgtcaccggatgttccaccgtctgttcttcttcctcttcttccaggaattcaaagacacgctcggaagctgcggctgcggactgcatcatgttggtaacctgtgcgatctgctgtaccggctgggtaaagtttcggatgtactggaagaaagactgaatatcaccgacttcaataactcctttgatagtcataaagccaccgagaagagctaccattacgtatccgatattacctacaaactgcatgatcggcatcatcatgccggagaaaaactgtgatttccagccggattcatataactttttattcgtctcctcgaaagtggccatcacagcatcttccttattaaacgcttttacaatattttgtccggcatagacttcttccacctgcccattcacatcacccagatatttctgttgctgccggaagtatttttgtgaccgtttcatcaccttgctgataataaacatcgagcacggcagaatcagcagtgcacataaagtcatccatacattaatgctaagcatcatgataaatacgccaatcaacgttgtaacggaagtaatcagctgtgtaatactctgattcaacccctgctgcagggtatccacatcgttggtaattctggagagcacctctccgtatgtccggctttcataatatttcatcggcagtctgttcatttttccggaaatatctttccgcagagaataactgacatcattggagattcccgtcatgataaatccctgcacaaaggaaaaggctgcactgcacagatacagtcccagtgtccacaacagaatctttccgattttatcaaaatcaatccctccggttccgttgacctttgccaccagaccgttaaacagttccgtggtcgctttaccaagaatctttggtcccacaatattaaataccgtaccgacaatggcgaaaatcatcatgccaatcagacgaatcttatacttactcatataacgcagcaatttttttactgctccggagaaatcctttgccttttctccgttcattcttccccgtcccataggtccccgggagggacgtctgctattttcactcataatccagttcctcctgtgacagctgtgaacgtgcaatctgctgatatacctcgcaggactgcagaagttctttatgtgttcccataccgacaactttaccctcatccagtaccagaatccggtcagcatgaagaatcgtgctgatacgctgtgcaacgatcagggttgtggcttcttcggtttcttcttttaatgcttttcgaagtgccgcatctgtcttaaagtccaacgcagaaaaactgtcatcaaaaatatagatttccggctgttttgcaatggctcttgcaatcgacagcctctgtttctgaccaccggacacattgcttcctccctgtgcaatcgggctttccataccttcttctttctgctcgataaactctgttgcctgagcaatggctgctgccttctccagttcttctctggtcgcattctctcttccataacgaagattagaatcgatggtgccggaaaacagcacacctttttgcggtacgtaaccgatccgttcccgcagatctcccagtttcatctgccggatatccacgccgtccacccggacacttcctttggtcacatcaaagaaacgcggaatcagattcaccagagtacttttaccacttccggtacttccgataaaggcaacggtttctcctttccttgcttcaaaggtaatatcagacaacacttcttcctccgctcccggataagcaaaacttacatggtcgaagactaccgttcctttctccttttcttccggttttacacagtttttaggatcttcaatagaaagtggtgtatccaggacttccaggatacgattggcagccacacctgcacggggcagcataatagacatcatcgtgatcatcaagaacgacatgataatctgcatcgcatactggataaatgccatcatatcacccacctgcatattaccggcatcgatcctgtgtgcaccggtataaataatcagtacactgatcccgttcatgatcagcatcatcagcggcatcataaaagtcatcgtacgattgacaaacaggttggtctttgtcagtctctgatttgcttcttcgaaccgctcttcttcatgtttttcccggctgaacgcacgtatcaccgggataccggtcaggatctcacggctgaccaggttcagacggtcgatcagatcctgcagctttttaaacttcggcatagcaactccgaagaggactgctaccagaatcaggattgctgctactgcgatgcccaggatccatgtcattgatgcatctgtgtgcaacactttcagaacaccgccaataccaaggattggcgcatataaaacgatacggaacaacatggtatataccatctgtacctgctggatatcatttgtacttctggtgatcaaagatgcagtggaaaagttatccatctcctgacttgaaaaagataatacctttctatacaccttatttctcagatcatgaccaagtttcgccgcgatcctgctggaaaagaacgttacacagacagaagcgatcatgattagtgctgccagaagcaacatcttaattccggaccacagcacatactgcatctgaatcttgtccagatcttcgcccatttcctgatactcatttttcagataccggatggctccctgggttacgatagattccggcataccatccagtttttctgtcatttgttccattatctgccttctcgcctcatccggaagctgtgcgattgcctccggcacatccgcaccgttcggaagctgcatcttctctgccagagcattctgtgtatctggctgctgcagactgcttactgccagcatcgactttccgaatatagtattcagagaatctctttcttcttctttcagttttttatgggtatataccccatcttttaacgtataatattctttgacttcttgctgctgatcactgtccatgaataaaaacagctgatccatggagctttcccggatctgatccggcacactgtccggaataccaccctgctgtacacccacattgataatatccgaagtgtacgatggcaacgccagatcacagaatgcctgtccgaacagcagtgcaaaaatcagtacgatataacgataagaacctttcagttccctaaacattcgtaacatacctattcttctccttctttaaaatatccgtaactgttcgctatattcacagttacaggtaatccttaatctcagtacttcccggcattttttccatattctcctgcatctgaaggatctgttttttcagatgatctacctcttccggagtcattccctgaagcatcacactacccacttcttttcggatcttttccacttcccggtgaatttcttttccggaatccgtcaggtagattctctggatccgcttatccttcgcatcagccacccggtaaatcagagctgctttttccattcgctgcagggacaccgtcaccgtagacggtttgatacacagacggctgcagatttctctctggctgagtccctcctgccgataaagaatatccagcatcggcatctgccccgggtgcagattcacatgtgaaagctgatgaaatatctttgtcgcatacacatggagcaattttatcatcagaaaatctacggaatgttctttttcactcattcgatttcttcctttcttattagttagtcagctaatatttcgtcgaccaactaataatatcacttattttgcaggatgcaagagtttttatagtttttttatattttttctgacaataaaaacaggaaactcctgaaacagatgaccacacaccgtgtgtttctgtttcaggagtttcctgtttttatttctgttactgattcagattatgtgctttctcataagctgtgatcagtttcagattttcaatttcaattgcattcagatatgaattatcaaactgatctgctgatacacttggcgtataccaacttttggatgcaaaataatctgccagatcatccgacttgaaaattcttccgtgacgggcataaatctcgtttcttgcgatacgcatctgccattcggaaagaccggtcagatctgtgttggtaagataacgggtactgctgtccggtatcacgtaatcgctgtttccggtatcacttgcagtttctgcatcattgacttccgcttccttatgctgttcctgaaccgcagcttcctgagtcggttcaggcgtgacctgctgtgtcggtgctgcagtcgtttctgcttcctgcgccggtgatgtttcctgggttggctccggtgtggctgtcacttcgggggttaccgtctccggttctttcactgtttcatccgcaactgacgcatcctcactctcttctgtatctttttcatctctgtcctgaatcttctgcatatcttctttcatctgttcattcagctgcggcacttttttcgtatctccgcttcctgcacctaccagctttacaacaccaaatacgatagctaccaccagaacaacgataataattccaagaatagcaaaagtgatcttctcttttttttcttctctttcccactcttcctcatcatcgtcatcatcgtcttcctgatgttgctccatctgataaccatatcccattccttctgtcatacgattatcatattcaggttccggctttttctttttgatgtggggcactttctcttcctgttttttataagaatcctcatttgcagtctcctgcatcggtttctcttctaccggatgtccacatgccccacagaaacgatccccgtcctccagacggtttccacaatatttgcaaaacatactgtttcctccataatctgtgttgctgttttctcttcttacagcattctgtcgtatggaaaaattatataacgaactttccgaaaacacaacaggcaaaaactgtctatcttcttacattttccatacatttttgtctgtggtggaaattgctacggcaccggccttcagtgcagccacaatatcttctttttcgctgatgagtccgccagcgattacctgacatcttacacttttttttattctttcgattactcgcggcatcagcccaggaagaatctcgatcacatccggacgataccctgctgtctgtttctgaatattatcatatgccatggaatcaattacaaaaaaacgaagcacagtgaacatccccagttcttttgcacactttataagagctggtttcgtggtaatgataccatcggcacgggtatatgtcttcaaaaattccactgctgcatcttttccgcttaatccctgaatcagatcaatatgtaccactgcgatttttccctgatctttgatcctttttacgatctcaccgatcgtacataccgttccatatagaacaaataccatacctacatccatattcaggcactcttccagtcctttctcgtcttttactgccgcaatcaccggacagtcttccagttcttccattatttttctcatattttttccttcctgtcaggcacagtaagctgcccctatctgttccagacaccagtaataatctctcacatccacctgttcacctgcatatatcggatattcctgcagcagctccttgccaagaaaatactgtgccactccaatctgttgtccctttcggaccggagcttccagctgtggcggcaattgatagtgaactgtgatctgttcatctttccgtaacagcaaagacagatgcatctgttctacatcggatccgtattccagactggtcgttgccacttcatcgatggtcgtcccctgttgccggccattcagcactgcgatccgaccaagatctttctgttcaaacacatcccgatattcataattggtcagcccatatgtcatgagttttctggtatcttcccacttatatccacggttattcggccatccacatgcaagcagcgatacaatcagagtttttccctcccattgtaaagcacccacataacaatatcctgcatttcctgtaaatccggtttttcccgtcaatgctccatccatcattccaagaaacgcattatgattggtgcattgataaatctgcgtcttactataattccagaatgtataggcaggcatctgcgtaattgcaagaaattccgcttttttcggagactccatgatgcagtatcgaagaattcttgccagatcttttgccgttgtactgtggatcccatttttattctcggcatccagaccgttcggtgtaataaaatatgtatcatcgcagccgagttctcttgctttcagattcattttttctgcaaatccttctactgatccacccacttgctctgcaatcattacagcagcatcattatctgaattcagcatcagcgcatacaaaagatcctgcaggtaaaactgttctcctgtttttgcacccatatgtactttcggctgactcgctgcgtaggcagatactgtaaccagatcatccatccgtccgtcttccagtgcaagaatacaggtcataatctttgtagtacttgccatcggaagtttctgttcactgtttttagaatacaaaacacgcccggagtctgcatccatcagacatgccgaacgcgcataaagttctgattcactcagctgcatgccatatcctgtcatcggtgttcccaccagtgtcataagcagcagcaacaatcccagctttatttttcccatatagtatcctcccgttttttatcacagttttccaaagatactatatgcatttttctttcttttagaaccagtttttctctttgttacagatccagctgcaactgaatctcttcttccgcctctgccttaaaatcttccattttcaccggactgatcgttggcagatcctctgtcgactgtactccaaaattcctcaaaaattcttccgttgtcccaaaaagaataggacgtcccggggcatccagtcgtcccagttcctgaaccagattatattccaccagcttattgatcgcatggtcacattttacaccacggattttttcaatttcctgtttcgttaccggttgtttatatgcgataattgaaagtgtctccagcattacatccgtcagtactgctttctttggctgcaatgcaatctccaccagatattcataatactcctgtttggtacacagctgaaatgctccatccaactccaggatcttgattccacgatctctggcattatatttcagcatcatattccggataattttttccgttgtagttttatcctgtccaattgctttcgcgattcttccggtttccaccgaatcgcctgcagaaaataaaatcgcctcaatcgctgcttccagtttctccatctgcctgctgctcctcgtatattaaagatgtaatctgaatatcatcaaataaatgttcctgctctatggtaatcacgccggttttcatcaattccaggatagcaagaaaagtaacgatcacctggatcttaccggactgtcgttccagaagcccacggaaagaaaaataatgatgtgttccggcatataattccagatcactcattttgtcttccagactgacttcttctttctcaatcttgccaaatttgcttcgaatcggatctaccttgttttcctgacgtttaatgatagaattgaagatattctgaagcttggccagtgtcagatctccgattagttcccggatatccaccggtggctgataatccagtacttcttttggcatactctccgcccgatatacacagcgggaagcatctgccatacgatctcttaactcataggacatgtatttaaacatcttatattccagcagctgctgcaccagttcttcacggggatccttttcttctccttcttcagttacttctttgggaagaagcattttacacttgatatccagaagagttgctgccatgaccataaactcactcatgatattcaggttttcttcctgcatctgccggatatattccatatactgttctgtgatctccacgatcgggatatcatatatatcgatcttattcttttcgatgagatgcaaaagcagatccaacggaccctcaaatgcttccagttttaccggtattcccatgtttcttcctcttttttcttctcactctatacctgaatttttattttacaggcattttctcattttgtaaagcagagattcgaacgatagtcagttctctggggttatggattcttaccgggatcgtatgttctcccagacctgcactgacaataactgcacatccgtttttctgatgcatccctccacattcacccggaaagatccgaaaatcaggtgcgattgctccccgctttttcccaagcatcataactcctccgtgataatgcccggaaaatgtcattgatgctccccaggaaagatactcctttttatagcgtggattatgtgccagaagaatcgtcagccgatccgtatccggagttccaaagtgcttcttcagctcttttaccataccatcctttcgaaatcccttatcataaaactgctcctccggttcaaggccatagacagtgatcggtattcccttttttttcagctgtactttttgattacgcaaccgtatcagcgacagctctttcaacgctgtctcatagtttttcccgatctccccgtaaatctccggatgttctgaaatacgttgttcatgattcccactggcataaaataccggataattatcagacaaccttttcagaaatgcaaacgctttcgacgtgtcacatccttttttacccactatcacatcaccaccaaccaacaccagatccggctcctgttccttgagaagatgaaaaatcctctccccatcctcacccgtaacctgatcatgaaggtccgtcagaaaagcaatcgtcagttcctgttttcctttgatacaggatgatgggagctgatactcccgcactatcgttttcttcattatttattcctcatcgggtaattattgttccgtttctcacctggtacattgtcttcaaataactgtaccagagatttgttgcccgtactaaaaaatccccggtctaaaactttcgttttacaccggggtgttgttgacttttctcgtcggccggatgccacaaaaattattttgcgtaatctacaacacgactttcacggattacactgactttgatctgtccaggatattccagttcagcttcaatctgcttggaaatatctcttgccagcaataccatgtcagaatcgttgacatgatctggcaataccataattcgaacctcgcggcctgcctgaatcgcataggatttgtctactcccttgaaggagtttgtaatatcttctaactgcttcaatctgttggtatatgtttccaatgtctctcttctcgcacccgggcgggcagctgagattgcatctgcagcctgtacaattccggcaatcaatgattccggctctacatcaccgtggtgagcttctactgcattgatgacaattggggattctttatactttctacataagtcaacaccgatctgaatatgggatccttccacttcatgatcgatggattttcctatatcatgtaataagccggcacgttttgccagacggatgtccgtaccgacttctgccgccagaaggcctgacagctgtgcaacttcgatggaatgctttaatgcgttctgtccataactggaacggaatttcatacgtccaagaagacgaatcagttccggatggataccgtgaacacctacttccagagcagcgttctccccctcttcccgaatcatggtttctacttctttctgtgctttctccaccatttcttcaatacgagccggatgaatacgaccatccacaatcagtttttcaagagcaattcttgccacttcacggcggattggatcaaatcctgataaaacaacggcctccggtgtatcgtcaatgattagatctacaccggtcagtgtttccagtgtacggatatttcttccttcacgaccgatgattcttcctttcatctcatcgcttggaagctgtacaacggagatggtagattctgccacatggtcaaccgcacatttctgaatggctgttaccacatattcttttgctttctttgcagcatcttcttttgctttgctttccagttctttgtaaagttttgcagtatcaattttcacttcatcttcaacagattttaaaagataatcctttgcctgttcggaggtcagtcctgagattctctcaagttcctgtactccctggtcatgtaattcgtcaacctttttctctttcttctttaactctgtctcttttgctgaatactctgcttcccgtctttccatcgcattcgccttacgatccacagattcttcttttgccagcacacgcttttcatacttttgcagctcgctgcgtctctctctggtctctttttccagttcattcttggttttcagagattcttctttggcttccagaagagcttcgcgtttcttagtttccgccgttttcagggcttcatctatgatgtttcttgctttttcttccgcagtgccaatcttttctgcatcctgctttactttcttggcaacggcaagcttacaagccacaggaaccgctattaccagcgcaatgactacagcaataattggaattaatatattgattccgtttgccataggagcacctccttatttagttttcattgtacgtttacaacagtataattctataatgatttcacaaatttgtcaacggattacctgtttttttgtagatatagttaccgttcatattactgctcactgataatatcccgcaaggtgttttttgtgagcgaagagcacagttacacctcttattccctctgtgaaaaatattcccggaacaccgactgaatctctgaagaagaaaagccttttctcaataaataaccataatgtcgtcttttttctttttcatttgcctctttcggatgtttgcagcgtttttccagaagctgacgaatcatgttcgtttcatccacacacccttcttcgtcatccattgcttcctgtcttcgttggatcatctcccgcggaattccctttcgttccagttcaaactgcatctggcgtctgctttttctgccctgataggcagacagatatctcgctacgtatcgttcatcatccagataatggtacgaacgcacataatccatggcaatttttaccgcctgcggtgtatattcgcccttcattagtttcttttccagttctgcttccgtgtaatccatccgtgtcagcagatgcatcgcccttaattttgcccttttcaccaaaatttccctgaagatttcttggaaaatttctgctgatagttcaccattttcttttaatcgataacgggaaagctcgcccttatataacataaaggcgagctgttcatctgtcacaacgcgatactttgtttttgttacagggacaacctctacgattctcatacttcatcatctgatgcatctgtcagaacatcctttgctttatccacatctttttctgcatcctgtggaccatcttctccaagtccgtaatgggctcttacctgacgttcgatttcttccgcaatctccggattctctctcaggaatatctttgcattctctcttccctgaccgatcttaccatcattgtaggcaaaccatgcaccacttttctggataattcccagatttacagccagatccagaatatcactttctttggaaattccttttccgaacatgatatcaaattctgcctctttaaacggaggcgccactttgttctttacgactttcacacgggtacggttaccgatcacctctccaccctgtttgatagtttctgttcttctcacatccatacgtacagacgcgtagaacttcagcgcacgtccaccggtagttgtctccggattaccaaacatcacaccgattttttcacgcaactgattgataaagattacaatacagttagacttgcttaccacaccggtcagttttctcagcgcctgagacatcagccgcgcctgcagacccatatgagaatctcccatatcgccctcaatctcagcctttggcaccagagctgctacagagtccacaatgataatatccatcgcaccggaacgcaccattgtctcagtgatctccagagcctgctcaccgttatccggctgtgagatatacagttcatcaatatctactccgatattttttgcataagccggatccagtgcatgctctgcatccacaaatcctgcaatcccgccacgtttctgtacctctgctaccatatgtaacgctactgttgtcttaccactggactccggtccgtagatctcgatgattcgtccccgcggaacgccaccaagtccaagtgcaatgtccagactcagagatccggtaggtacagtctgcacattcatgttcttaccggaatctcccagtttcattacagatccttttccaaactgtttttcaatctgtcccaaagccgcatcaagggcttttaatttatcttcttttgccataatgtctccttttttcatgtacgaacttatgttcgtttcactgtttacatactattacaaattagttttgttgtcaactgctatttttgtttttaaaaattttctgagaatttcggcgatctgccggatgaataaaaaagatcgggaatgtgtcctgccacgtccttgcggatcgttttacctttgcatgggaacaagtttcctctaaagtaagaaagcaggtaactattcagcaggtagtatcccgcgaggcgttttggcatgttttttgccaaactcccatcactgaagttgattttaaatgcgttttggctcgtaactgtgaaggtactgaacagttacgaaaacaggatatttcaccggcggaagctccgccggtgtttcctgtatcgtatttttcttttgttccgggatatcggatgtttttcacattctctctgcctatgtcagagtatcccgataaattctaataacctgccagccaggtgtacatctcttcatactgctttgcagaattgttccaggaataatcctgtgccatgccacgatcaacgatcttgttccattcgcgtttgcggtcatagtatacccgttcagcgtagcggatcgtatttaacatctcatgggcattatagtttgtaaaactgaatccggttccggttccttcaaactcgttgtacggctgtacggtatctttcagaccaccggtctctcttacgatcggcacggtaccataacgaaggctcatcaactggctcagaccacatggttcaaacagagacggcatcaggaatgcatctgccgccgcatagatcttatgtgacattgcttctgaataatagatatttgctgaaacctttttgtcatacttccaagcaaaatgccggaacatattttcatatttttcttctccggttccgagaaccaccagctgaatggcatcctggcacagttcatccatcatataagcgatcagatcaaagcctttctgatctgtcagacgggataccacaccaagcatcatagccttcggattcacttccagtcccagttcctcctgaagagctatcttatttttcactttttcttttcggaatgtctttgcattataattcattgcgatcatggcatccgtttccggattatattcgtcataatcgattccgtttacgataccacgcagactgttgcttctcgcctgcatcagtccatccagaccttccccgtagaatggtgttttgatttcttccgcataagtgttacttacagtcgtgatggcatctgcatataccagaccgcctttcagataattggcatctttattcgcctccagtttatccggtgtgaagaagtaatcagacagaccggttatactttttacagtcttaatatcccatactccctggaatttcaggttgtggatagtcataactgatttgataccacggtagaaatcacttccctggaaacgttctttcagatataccgggatcagtccggtctgccagtcatgacagtggatgatgtccggtctgaaatcgatcaccggaagaatcgacaatgccgctttggaaaaaaatgcgaatttttccagatctcccggcataccataatatggcttgtccccgctgaaatgttcttcattatcgataaaatagaatttgatcccttcatattccatctcgaagattcctacatactgctgtctccagttcagatccatataaaaattagttatgtaatgaagccgatctttaaattcctgtttcatacaggcgtattttggaataacaactcttacatcgaaatattcttttggaaaacatttaggtaaagaacctacaacatccgcaagccctccggtcttgataaacggtactgcttccgatgcaacatataatacctttttcatgcgaataacctcctgtttttcctaataacaacatctgttttatattatatcgcatttttaccaaacagaaaaggggttatgcctgtttttttatgcatttttcatctcattctatcaatggagtgtaccatgttcatattccagccggattttgtccgcaatcaaagctataaactcagaattcgtcggttttccctttccattgcttactgtataaccgaaaagtgcatcgatcgtatccatctttccgcggctccatgccacctcgatggcatgacggatcgctcgctccacacggctcggtgtagtctgatgtttcttggcaatggtgggatacaggatcttggtaatagaattgagcatctccatatcttccaccgacatcatgatcgcatcccgcagatactgatatcctttgatatgcgccggcacaccgatttcatgaataatatcggtaacatcaatctgcagatttttttccgatatttctcccgctctccccaaattgcccgttccccggttctctctgcggattccttttccaaacttgcggaactgtttgatccgatttagcaccatgtcgttatcaaaaggtttcataatatagtaacaggctcccagtcgaaaagcatcttcgatgatccgttcctggccgactgccgatataataataaaagccggtcgttttctgacagacggatcttcattcagcttttccataactgtaatcccatccatcttgggcatgataatatccagcaataccacatccggctctttctcttttataattttgtatatttcctgtccgtcgactgcctgaccgacaagttccaactctttatctccttttaccagtgtactgagaagatctaccattcgttcattatcatctgctatggctacgtttaatttttccattctaactaactcctccatctacttagtattttggaaattatgggccctaccacagattactgtgttccaaatgttgattctattataaaaaaaaactttttttggttcaagatatgacaacagagttttcccatttttcgttcgacaaaggatcacataaaatgacgattttctgtattctcaccacatattcttatacaaagagctgttatcgacagtttcacatcctctttcccggtattccagacagttctgtataaaaatacatgaaaacggactgcagctttcgcagcagtccgcccgtcttttataatttattctgtaaacaatggtgtggagtaatatctgtcaccggtatccggaagcagtgcaacgattgttttgcctttgttttccggatgttttgccagttcaatagctgcctgaagggctgcaccggaggagatacctaccaggatgccctctttctttgccagcagttttgctcctgcgaacgcatcgtcgttttctacggtaacaacttcatcgtataccttggtgttcagtacatccggtacaaatcctgcaccgattccctgaatcttatgagcaccgctcttaccctgggaaagcaccggagaagttgcaggctccatggcgatcactttcacgtccgggttctgggacttcagatattcgccggttcccgtcagtgttccgccggttcccacaccggcaacaaagatatccacttttccgtcggtatccttccagatttccggaccggttgtctcacggtgtaccttcggattggcagggtttacaaactgccccgggataaagctgttcggaatctctttggccagttcgtctgctttggcgatagctcctttcatcccttttgctccttctgtcagcaccagttctgcaccatatgctttcaggatgtttcttctctccacactcatggtttccggcatggtcaggatgatacggtatcccttggatgctgcgatggatgccagaccgattccggtattaccggatgtaggttcaatgattacggagccttcttttaagagtcctttttcttctgcatcttcgatcattgcttttgcgatacggtctttgacacttccggccggattaaaatattctaatttaaccagaagagtagcttccagacccagttctttttctacgtttaccacttcaaccagtggggtgtttccgatcagtcctaaggttctcttataaatatttcccataatacatttcctctcttttctttttttatttcgcaactgttcgatccccttgcagctacggaacttgttttgttttgttgagtgtattataattcccttatacctacttgtcaactatgtttttatgtttttttgaaaaatttactttgtcgcccttttacctattaatgcatctgcggcagttcttacaatatcagttttatatatcgcagcgcttttcctcgcgtatggctttttatttaacaggaaaacaatctcctgcaaaactatgagaaacttgcagagcgtgtttttcaagttaacgcggcagtcgccaaggtctcgtgcaagcacggactttgactcgttgctcgcttctacactcgctgacgctcgttaacgcggcagtcgccaaggtctcgtgcaagcacggactttggctcgttgctcgcgtaaataaaaaggcttccgcaggtcgggtgcattgcattaccgattgcgaaagcctttttactattattcattttattcaggtaaatctctgtccgattatgcagctttttcctgtggtttttcgaacagtttcttaatgccctgtactgctacgatcacaccaaggatcagaagcagaactgcgaagatcagctgcagggtatttccaagatccagacctgtggtcatcagagcaccggccagtttgtagatagtaagacccagtgcactgaaagtaacagccatcatgaatactgcaggagcccacagcataattccctgacgttttgttttcttcaggaacacggcacatgctaccagcgcaagtacagacagcagctggttggcagaaccgaacagtggccagatctcagcgtatcctacttttgccagcaggtaagccagtaccagtgtcaggattgttgcaaaatatttgtttaccatcagtttacggaatggtgtgtaatctttttcatccacatcgttatcctggaagaattcctggaaggacagacgtccgacacgggctacagaatccagagatgtcagtgcgaatgcagatactgccagattgatcagggtaaataccagagtatgtggcagaccgatgacttccaggaagtttgcaattgctcctgcgaagatctgtggctgtgtggtcagaccctgtgctgctgcttctccttttgcgaaagatgcaacggcgatcagagcgatgatagccagcatactttccatcagcatggcaccgaaggataccggcagcatgttcttttcatttttaatctgtttggatgcggttccggaagataccagtgaatggaaaccggatacagcaccacaggcgatggttacaaacaggattggaaacagagtctgtccatctatattaaaggaagtaaatgcttccagatgacactgtggatttgccacgaatacacctacgatggctgcaatgatcatgaagatcagcaggtaactgttcaggtagtcacgaggctgcagcagactccatacaggagctacggatgcgatcaggatgtagatgaagatgatcacatgccaggtggttctcggcagatacatcgggaaattcatacccagtgctactgctccaaccagcatcacgatagcgattgctgtgttgacccatttatgcagttttccgtaacgaagaatcatgcccaggcatacagcttcgatgatgaataacatggaagttgttgctactgcaccatttgcagtgatcttggatacggttccgtcatctgctgtcaggaatccgttgaaagttcctgctacaacatcagcgaaagcagctacaaccaggatacagaacagccaacagaacagcaggaacagtttctttcctgtttttccgatataagtttcaatgattgatccgatggaacgtcctttattttttacagaagcatacattgcagagaaatcctgtactgctccgaagaatacaccaccgatcaggatccataacagtaccggcagccatccgaagattgcagcctggatcggtccgttgatcggacccgcacctgcgatggatgcgaactgatgaccaaatacgatattggtatcagccggcacatagtctactccgtcttccatttcataagccggagttttcgcgttgggatcaatgccccattttttctcgaggtaacggccatagaagatataggctccgcctaataccacaatggcaattaccatcatcataataccactcatgtttttttcctcctttttctgactcattcagaaaacatgaacgacttccccgtcgcataagggataccctgagtttttcactctttcaaaataaaaaagccctgcagctttatttgctgcagggacgaatcttttccgcggtaccactctgctttattgtcatagtgacaatctcttttgtactgtcagccggttttccggtgataacagatctccgataacggtgagtgccgtctgctcttactctatttcagagcggatactccgaagggatattacatcaggttttctgttgtcttacaccagccggcaactctctgaaagaaatcttcctgtgtaacttgtcttcatcaatgtttttctttatctgagcttatattagttttaccacttttgtttttttcacacaactgtcgacttatacaaaattcatttttcttttgtatagtttttatacattttttatttttctgtcgtttttccgtcagattctgcaacgcattccacatccggtgggtgttcccgcacatccaccgatggctgtttcacgcagttcaaacggaatactctttcctactttgtacattgcatccaccatctcatcaaacggaatcggatacatcacgccactcaatgtgatctccgcacaggtcacagcattaaccgcacctatcgcatttctgctctgacagggaacttccaccagtcctgccaccgggtcacagaccagaccaagcagatttgagatcgccatagctgctgcctgcagacacatctccggtgttccacccatcagttctgtcacagcagcagcagccatcgccgatgcagcacctacctctgcctgacagcctgcctccgcacctgccacagaggcattccgcatcagcagatagccgatggccgctgtatgaaataatgcatccgccatctgttcatcgctgaatcctttttcctcctgcagtgccagtaacactcccggaaccacaccggaagatccggcagtcggtgccgcaacgatgacccccatcgaagcgttgacttccagaaccgccatgctgtaagcgatcagtttattcataaacgttccgcagacatttgtcccgctctctctgtatccggtaatctgctttgcctccccgccgatcagtccgctcatggacggtttcgggtcttccaatggctttcttactgcctctttcatgatggcgagggcttttcgcatcttatcttccacttctttttttgtggaggatgtgccttcgatctcccgctgtttcatcacttcggagatcgaacactgctttttcttacatacttctaataattcctgtccgtttttaaaatctgtcatctgtccgtctctcctatatctgaatcagcaatatttcctgcacatacgggttctgtcgaatctcttccagaatctcatccgggatccgctcatctgactccacaacagaataagccgtttttcccttgccctcacggaacagccgcatgaaagcaatatttacattcggattgctcaaacactgcgtaatatgtgttaccacacccggtttgtcgatctgttttaccaccagcgtactgtattctccggtaaattccacattaataccgttaatctgggtgatcttgatcttgccgccaccgatggactgtccctgcacctgcatcttagtgccgttttctcctgtcatccggatatccacagtattcggatgatccggaacaaactccttatcagcgatatactgatatttcactcccatcttctctgcccaggaaaatgcatccctgatccgcagatcatcggttgcaaatccaagcacgccgccaagcaatgcccggtctgtaccatgtcctttatacgttcttgcaaaagaaccatacagagtgaatgtcacctctgtcactttttctttgaaaagctttcttgccatctttccgatagatactgctcccgctgtatgggagctggacggtcccaccatattggggccgatcacctcaaacgcactgataaaattcatcgtttcctcctagttgtcttttcgcgatacaaaaatgcacacgattgccgtgccgatcatggacagtcccagaccggttgcaagcattgcctttattccggcaaaatccacaagcacaccaccggacagactgccaaatacccctcccatggtacttgacgcaatcagcagcgactgacccttcactctgtcctccacagccatcgtttcatttacatagtataccgcagaaggcagacataatgcaaatgataacatctgcagcatctgcactacatacaggaacgatatactgccacacaccagataccccattgctttcacagaaaacattaccgccgcaaaccgaatcagttttctactgtcccatttgccaaccagcctggaaaacaacaacatcgtaggaagttcgctcattgcagatactgtcagcagtgttcccatccgttttatatctcccccgaggcttaccacaatattgatcagataattgttcacatatgtactttctacatagattaatatcattcccagcaataccagcatataattccgatagcgacatgcaaattccagaatcccgccacctctctgtctgtttgcagtatttttctgttcttcttttttactttcattcggatcctttacaaccggcatggaaatcaaggtaacgaacatcaccgcaaaagacagacatccaacagccataattgccagaccgtaatacctgccgatcagaattcccaaaaacgaagctgccaccgcataggatgcagagcccactcctcttccaattccaaaatccacatagataccatgattcacataatacaaactgatagaattgatcagtggctgtaccacctgtaataacatattaacaatcaaaaatgacagcacgattcccggtaccattttggacatacactgcatcagaatcagcagcaggattatggcaattgccatccctgcagtcatctgttgtaaagttacccgttttgcgcggtccgccgccgctgcaacaaacggctgtaatataactcccagaatatttccaagagccagcacgactcctatctgagaacttttcagtccgatatgtaataaaaataccgttgcaaacccattgatcgcacagaccgccacccaataactcccctgtaatacagcacactgcgcagttaatttttttgaattcatctcctgttcaatcctttcccatctgaatcctgtctttattttgctgttatccccataacagaaacaatctcagtatactatttccagctaaaagtgacagtgtcaattccgactttattttcggtcaaaatcgacttaactaaaaaaggtccaccggacctttttgtcgtatgcttggcaacgcaaaaaaagctatcctgaacagactgttgctgtcagaatagcttttttcttaatatattactacaggaaacttatacgacacaatatcatataattcttttactttatccaacggtgtattcacacacccatgagatccattatccagatacgcagtactgctccagtcacttctggttgtcagatcatggaatccaatggtatcttcggctgcaaaaggtatccagtaattacagtgtacctgatacgaccagttaccactggaatttttctcaccgcgcatggtataatctgtggttttccccttaactttatacacacctttgggagtttccgttcctttattccggcatccggtcaccacttctgagtccataacctgttttccgtccacatagacccaaaaatgctgatcggacaaactcagttctacgtaagagtttccgatatcattctcatttctgctcaacgcagtggatgtatacacaatttcaaaatcaccctgtgttccgtcattgattgcctgcatcagatttgactctgtaccggactgatcaatctcccatccatagtctcccggtgtcagcgttacggtattaccggctgttgtggtaaatgtccttttgctgttgaccgtatcatatttttttgcaagaccggccacgtattctttcactttttcttcatctatggaaaaacttccatcttctgcttctgctacccagtcttttaaggtattcttatccagtacctcttttcggtctgttccaaagtccatggtaaggtttgcagataatttctgattaattgcatctgcttttgcctttagttctgcatcatcctgcatgatctccggtttcacataacagtcaccggcatcgagatcaaaggttatctccccgttcgtcagagcctgatgaagtcctgctgttacttttccttcgtccagggtagttccttcttcctccggaatcaccgcatagccgtcatctgttatgcccacataggcatccttcggagcctgcatattccccggctgcatacaagtcagtccttccactgcctgtttcaatgcttcttcattgaccgccaccatgttctctaactgtacatgaacaccggtaaacgcatgaatcacccacgcccagggccgctgatcttccatcagtttatcaatttctccatcatcctggtaggtcagttttagctgttctccggtcagtgtttcttcctgcccgtttctttcttctattgtaatctgataagacggtatctgatccgcaatttttttcttcacctgcgcaacggtcatctccccgtaatcagtaccgttgatctccgtatgtgaataaaaatgactgctgtaataatatgctgcctcaccatagccggctgtcgcagccaccagaagcacaccggcaattcctgtcagaacttttttcttcgttgtcatcgttttgtcatatctctcccctgtaacgttccgactacttccttctgctatctttcatcgtatcgttactgctttttactttcatgttatatcatatcatctcatgaaagattttcaattatgaccttgtataaaaacgacaaattttttcttgtttttttgtctattatttcagtttttcttctaactgcttcaaatactcctccgtgtgagcacgcaatacgcagtctgcccgatgcagatatccgaagcagacttttgtatggcttttccgaatcgggatcatacggatcaggctgtccctttctttttccttctgcagattgcagctgagattggcaagatccgtctttcttaaaagttcccgcatcagtgaactgctgtttaccgtgacgatctgttgaaaatctctgctgtcaatcagatcttcctgcagatgtccggaagtgtgcaacagagaaatctggtcttcttcatgctgtacatatcgaagatttctcagttcctcttttgtcacatactccttttcataatatgggtggttcggtcccacatacagtgccatatctttttcttttaacggtgtgaacgtcatttttcttttctgtatcatccgttcaaaagcctggcgctgcatcttggaaataaacacaaaaccaacctccacctgtcgatgacagatatggtgaatgatcttctccagtgtctcctcataacacaccgcatgcagtttcggatgttctgcaagaaatgtggcaaattcttcactcagaagactgcttggcatagatgcgatacggatcgtactctcctgcgtctccatctgaatcctctggatttcttccatggaactcaacatttttcttgcctgatcgtatactttttctccctctttggtaagttccacaccttttttgcttcgttcgagaagctggtatccaagtgtccgctccagctttttgatcgttttacttacatgtggctgcgtcgtatacaaaatctgcgcagcctgactcagactccctgcatccacacttacaacaaagaactgtaattctcttaattccaatacgatactcccatcttttccaacaggtatgcccggagtcttacctttcctgttccagttgtttttccggatgcattacctgtttttctgtaattttcttctgctcttataccagaataatccgataaaagacagacctgccactatccaggaagcaatatagatccagatgatacattccatcgtctcaaacttcggaagaatcacccagatactgcatacccggagcagacagatgctgagaagcgtcgtaatcatcggtgcaacggtctcccctaaaccgcagcttgcaccggataatgcttccgcaatcgcataaaacagataaaacggcgccatcatctgcatatattttaccacaagtggaatcaaaagttcagcatcttttttatcaataaaccacgggccgacccatccggaaccaaaaaacaggaacagactgacggctcccaccgcacagaccgagataccggttccgataaccgctccttttttgaccctttctgtctgttctgcaccaagattctgtgcaacataagtcgtcatcgccggtcccatggagtcggcaagcagccagatcagcatactcagcttatcgcagatgctccaggctgcgatgctgtcggttcccatcgtgttgacactcgcctgcacaatggaattggcgaccggaaacagcatggactgcaaagcaagcggaaatccggtacggatcatcatcaccatatgctctctgccaaaatgcagatgccagacatgcacttttccgcgaagatgttcttctctcgcaaggaacagaaaggtcagaaccacgctgacgatctgtgccgcaaccgtggcagcagccgcaccgcctactcccaggtgcagaacacctaccaaaagaagatcacctaaaatattgatgcagctgctcacaagcagtacatacagcggacgtttcgaatccccgaaggcacgcaggatccccgctgccatattataaaggatcagggaccacagaccaccgaaataaatcgtgcagtatgtcagcgtatccctgtagatatccgccggaacacgcatcagtttcagcagttgcggagcaagcagtacgcctccgaaagaactgatgattcccaagacaaatgcgatcgtgaccgccgtacggatcgaacgatgcagatgctcggtagctttcgctccgaaatacctggaaataataatcgttgctcctgccgccagaccattcataaagttgatcgggaacttaaacagcgtattgatcgaatcgatcgctgccagtcccacttttcctgcaaaccgtcctacaatgattgcatccaccgtcacatacagctgctggatcaggcttcccgcgatcagaggcagcacaaagaataaaattgctttcccaatgtttccttcaatcagactgttactcttattttctttcaccttacttttctcctgttttatttatttctgcatattttttgtatacagatgacaggcgacctgatgatttggtgtaaggctgaccatttgcggagcttcttttttgcagatcgccatgcatttggtgcatcgtccctggaacgggcagccttccggcagctccagcgggcttggcgcttctccttccaggttctcgatcggtttggaaaaatccatgttaatatcgaagacagaccccatcagtgctctcgtatacggatgcacagcatctttggaaagctgtccgcccggaagtacttccaccacatttcccagatacatgactgcgatctgatgggcacactgctcgatcagtgcaatatcatgacagataaatccgatcgtaatattcttttctctctgtaatttcgtgatcagctcgatgatcgtcttctgcaccgatacatccagtgctgaagttgcttcatccatgatgatcacttccggttccagcgccagtgcacgggcgatcgccacacgctgtctctgacctccgctcatattgtgtggataccgatccgaaaattctgccggcagttctaccagttccagaagtctgcgacagttttcttctttttcggattttttgattctcccgaagttcagtaacggttcgcatatgatatcacggatcttcattttcggattaaaggatgcggtcggatcctgaaaaaccatctgaatattctggcggttctgacgcagtttttctccctttaattttgtgatatcttttccacggtacaggatctcaccctcggaagggatatcaagagataccagaaatttcataaaagtactttttccacagccggactctcctaccagtcccagtgtctctcctttataaaacttcagattgacatcgttgttggcaagcagtgtccgtccgtctgtagtacgaaaacgccgggtcacatgttttgcttccaggattacttcttttgattcagacatatctctcacctcccacggaaggaacggcacccagaaggcttctggtatatgcatttcgggtctcatgcagaatatattctctcgttccctgatcttccatttttccgtctttcataaccacgatataatcagacatatacgctgcgattccgaggttatgcgtcaccacgatgatactggttccgtaatcatcgcgcagttccatcatctggcgcacgatctgtgcctgtgttgtcacatccagtgcggaggtcggttcgtccgcaagcagcagtttcggctgataagacatacccatcgcgattcccacacgctggcgcataccgccggaaagctggaacggataggatttcatcacgttatccgggcttggaagattcattttttccagcatcccacagccttttgcccaggcatctttttttgagattttttcgtgggtgcgcagatattcaacaaatacatctccaacctttcttgtcgggttcatcatcgcaccgctgtcctgaaagatcatggagatctcactgccgcgcaggtttctccactcttcgcggttataggaaagcagatcctttccctcaaacgtaatacttcccccggaaaccactccacctcctgccagaagtccaagaacggcacggatcacggtagtctttccgcttcccgattcacctaccagtgatacgatctgtccctgtttcatatccaggttaaaattctgcacggtaggtacattcttataggaaacggtcacatttttcaactgtaacatatttaccatgtttgccctccttactcgtctttcggatccagaatatcccggagagaatctcccagcatattaaagactacaactacaacaaaaattgccagcccagggaaaatcatcatccatggtgcagactgaatacatgctcttccttcgtttaacatatagccccattccggtgccggaggttttgctccgaatcccaggaaggacatagctgccagttccagcatcataccaccgatatcggtagctgccgtgatgatcagtgtcggcagtgcgttcggcaacatataacgtaagatcatatacggtgttttagaaccggttacgatcgctgcttccacatagtcacagtgacggatcttcagaaccaggcttcgtccgagacgggcgtattttgtccagtttactacgacaacggctacaattgcatttttcatgcttgctcccatgataccggctacggcaagtgccagaaccagaccggggaaagacagcatcatatcagcgattcgcatgatcacgctgtccacgataccgccaaaatatccggcgatcacgccaagtgttgttccgataaagaaaatcagtgcaactacaccaaaagttgctgtcagagacgctctcgctccgtaaatcacacgtgcaaagatatcacgtcccatcttatcggttccgaagatatgtgccttgctcggagccagaagggcttcatccaggcttcctttcagcggatccacacccccgctcacaaccggggcaaatactgcaatcagaatgatcacaacagccagaataagaaaaaaggtaaactgcttatactgtgcaaaaaaattcttctttttcatactcattactcctttaatctcattctcgggtcaatatatacataagaagcatccacgatcaggttaatcaccatataaatcagtgccagccacagtacataaccctgaatcaggttataatcgctggaagtgatcgcagacactgcaaggttaccaaggcccggataggaaaaaataacttctactactgccgtaccaccaagcagagatccgatggacagaccaaacatggtgatcagaggaagcagagagttcgggaatacattgcaccagacgattctggaccattttactcctctcgcctgggcgccgatcacataatcctggctcagttcatcaagaactgcggtacgcacctgacgggtgtatttggaagtcatcgcgatcgccagtgtcagtgccggaaggaacagactcttaaagtctcccgcagaactgattaccggaaaaatctggaaatagacacaaaacgccatcattaaaagaagtcccacccagaagttcggcatcgcacaaccgataaacgtgatcccccgtaccagataatcaatccaggtatcttttttcaaagcagatgccataccgaggggaatagaaagtaccagcatcagcagtatcgccatcagtgtcagttttaaggtcggccacagtctctctgccagaagttctgttaccggtttgttcagggaataggatttcccaaaatctccctgcagacagttgccaagccatcttccatactgtacaaaaaacggatcatttaatcccatctcttctcttgtctgctctaccatctcctcagtcggcattacaccgttggcggaatacatgtttcgcaccggatctcccggtgacatataggtcagaccgaatgtaataaaactgataccgaacagtaccacgatgatctgcagcagacgcatgagtatttgtttcttattcaaatcgttcacacctttctttttccaaaaaatacatgttaccttgtcatgcaacggcataacgcccggttgtaaaaacaaccaggcgtttccagagttttttattctgccggaacaatctccgtacttaaccagtaataatctgcggtatgaatcttcgcatatcctacatttttggaatagatcatactggagttgtagtatccgtcgatcagaactgccgcatcatcgatcagaatctgctgcatctggaaaatcagatctgcacgtttgtcctcatccatctcacttttcagttcctgatataatgcatcgtattccggattggaatatgcacagtaagtgctttctgttgcccagtttgccatgtaagcgaacggatctccggttcctacggtaatccagttgttgttgttaaaatcataatccagtgctgccagcttactccactgatcatcagaacttccgtactcggaagtaacaccgattccgatctctgtcagatactgggtatgtgcatcagaaaattcattcagcagacggttttcataagaaatataacgcagattgatattttctccatcaatctcacggataccatctccgtctgtatctacaatacccgcatcatccagcagtttcttcgcaccttccggatcataggtgtatgggttgttcagtttctcatatccataggacaggttggatggaagtacggaaaatcccggtgtatacagtcctccgatcgtcttggaattacagatagtatcataatcgatcgccatcagaatcgcctgacgcagtgtcttgttacccagaacgccatcaaagttcatccaggagaacccgcagcgcacacctgttgcgatgtctacggtataatcatcagaatcctggaatttctggatatctgctacgttggtgatattctctaccaggtcaacctgtccactttccagtgccattgctttcgcagagttatcgcccatgtacagcaggtttactttatcataaggaacttcttcccggaagttcgggtttgcaaccagtgtatagccgacacccacaccgttgaatgaatcgatcatgtacggaccggttccgatagtaccgttatcaaagttctccgtatgctctacgtctacgatacccatggtcggatgactgagctgtcccatcaggttagcgtaaggctgtgtggtcttgattgtcagcgtacccgcctcatcatctgcatcgatggttgcctcgaactccagatatttttccggttttgcggaaccggacggtcctacttctttcagatgttcgtatgcttcttttactttgcttgcggtaagatcacatccgtcagagaacttcagaccttttttcagggtaacgacccattcggtatgttcatcattcacggtatagctttctgccagccatggttccagttccatgttatcgttgaacttgaacaatgtctctgtgattccgtaacgcatcgcgttccagccaccgttctcgtcacctgcagtgttgacgcttccgtcggtgtacattgcacatccgaagttcagaaccttctcatcggatgaagcttttgatgatgaagaagagctgtcacttcctttgcttccgcagcctcccagtaccgtcgttgccattacgcctgccagcagcagtgccagtatcttttcttttttcactaattttcctcctgtgttttgtttccagttgtcttccatttcctgttttatagcatagaaaaaacagtctgtatctttatgcagactgtccccttaatttctgacgcagcagttttccggtttctccacagtcaaaagacaggtttgcacctaaatcatgccgaaaaatcacttaatcatattttaagagttctcatcagccgtgagaaacatctcaaagatataagcagttctcctgacttcagttcatcacctcaaactccttcccggaatttttctcttccagtggctcatgttctcggctccctgtcacagtggcgggaccgcaacggattgacaccgttttctctatcaatgcttattgcaacttatatcctgaatgtaacgcagatgtcattttaacagaaaaaatccgttttcacaaggtttttatgtattccatttagttatatatgagtatttgtttttgcaccatgtattatcttaattgttatattgtaactgttcagtaccctcacagttacgagtcaaaatccatgaaaaatcgccttcggcgatgggattttgacttgcatgtctcgggattttggcatattcatgccaaaacacctcgcggaataatggtgtgctgaatagttacgttatatttactgatctctttcagatattcctttcctatcgaacttaacggaatccccttccgtttcagatatccgatcgtcatggtttcttctgtggagagctttaccgcgcaatactccgaaccattcagattttcgcagataatgccgccgcaaagtgtatatccgttcagtcctttcatcagattcaacatcgtcgcacgatcattcgccttgatcgactgtttgtattcatacgtactgaacacttcctccgcaaaataaaacgaattgttgctcccctggtcaaacgaaagaaatggataatcttccagatcctccagagtaatctccttctttttggccaacggatgaccgctccacaggtaaacgtattcctgacagtcaaaaagctcatgaaattccagattgttttcctcaaagatcttccccagtactttccggttaaaatcattcagatataaaattcccagctcactccggaagtttttcacattttcaatcacatcatacgtctgtgtctcatagatggaaaattcataccgttccatcccgaagcgtctgaccatctccacgaatgcctgcactgcaaacgaataatgctgcatggaaacgccgaactttttctttactttttctttatccacataccgtgcctcgatcagggcatactgttccacgacctgtctggcatatccgacaaattcttctccgtccggtgtcacctggatcccgcggttcgttctccggaaaatctcgattcccacttcgtcttcgagttcccggatggctgccgagagactgggctgggagataaataacttctgtgctgcctgattcatcgaacgggaatccgccacggtaattgcatagcgtaactgtgataatgtcatatcctgctgctcctttttctgtcgtgctgtaaaaatatgttttgattataccctaaggtttcccataaaaaaagaccttacggattctttttacggaatccataaggtcctcgattttatttgtcaaagctttatgccagtgctgcgcccagtgccttgcagttttctacgccgtcatcatccggcatgtcgttgcagatgacactctctgttgccagaacagctcctgcttctttacagctttcctcccagtttctcatccattcaccgtcgccccatccataggatccgaacagtgcgatctttttatctttcagtgcatctttgcagccgtcgaacattggttcaaattcatcttcttccagcacttcatctcccatagccgggcatccgaatgcgatggcatcgtaatctgctaccagttccggacggaaatccgcacattcatacagagttacatctgcgcctttttcttttgctccatccactactgcatttgccatagcttctgtatttcctgtactgctccaataaacaactgctactttactcatctttatattcctcctgatatttacgggatgccccgtttttatggttaagcagctacggtcagctgcaaaacgctcctaccattttcccacagccgggaatagatctctctgcattttttgtatctgcagaatgttttctctgcttcttttgcattaccataggctttccagcagccggaacacttacagtttttcccggtattacggataaatccgatcacatcaaccaacggataatcgagaaacagaccaatctcatgagggaatttttcacacatatgtaatctgtctttcaattccgtcagtgcctcttcccagtgctctccccgatatccgcacgcccgcagaaacttttgtactcccggtttatgaagatcctgctccagtctctgtggcctgcatagataaaccagtgcttttttatcgttttttcgaagaatcgtaagataaagtcccttatccttcatctgcagattccacttgcgcacatcttcctccagactctcaccggactcatacggacagctgaacatattagccgtcttcaacgatgccagtgtgggcgaacaatgatcgatcagatatctttccagcatgtctctcctccgttacatccctcttagtttgcaaaacagttttccagaatcccggtcagtgcgtttccgctgctggtgtggcagcgaaccacatcggtatgttttccgtcgatctcatccagtgcgcagcgcaccatcttgtgagatacggtattggtaaataataccagaagatccggacatccgatttgtttgttgaaatctgctcccatgtgggtaaatactttcaccttacatttataggatttacagatttttttatactgtgctaccatgcggtcgtgtccgcctacgattacaacgctcatatgattcctcctgtcttctttgaatacttgtaactattccgtagccactgtgaaggtactgaacagttacgaatactttttattcacgttccatccggttttcccggatctcttctcaataaatatcagcttgtttcctgcgggttagatttgtctaacttatgaaattagtgtatactaacttttgctagttgtcaactaatttcttagtatttttctaggaattataaaatttttgtcctttttttgaggaacagcagaaaaaagccgggaatccaggggaatatttgtttcgtgccagctgctgccgctttgatattcccctgggaattcccggttctttgccatgttttatgttttttattctgcttttatctcatccgtctcgataataaaacggacacttccgcttgctccctcgcagataccaccataattatcgtatctgccatctgctttcttcagtgcacggatccggtttgccaggcttgtcaggtctgtacccgtcaggtcgctgagctcctgaattccgtcctcgtcaaatttgaccagtccctgatgcaggctgtccatgcctgagatcatcgtatccaaaccgtcgatcagggcagttcctgtggaagaaagttgtccacttccctgatgcagtgctgcggatccctgatacagctgccggattccttctccaaacgctgccataccggcttctaactgactgctgccttcctgtaactgtactgttccggtctgcaatgcggtaagtccggtctgtaattcctgcagcgatgccgcagtagtctgggataccgtaccgagcgtggtgccgtaacctgccagaatcttcatctgtttttccatatcagtcagcgtctctgtcagtttttccgtatcaaaagaaacttccggtatcgtgatcggcggaatggcttccagtgcatctttcgccttttggatctgtgtctttgcttcctcactcacggacacctgatccagcgcactgtttaccgctgtttttacctctccttgcgctgcccggatctgatctgcgctcagcccataattttccagtgctttctgcatggcagcttcaactgcctcatcggcttttgcctggctatctgcgcgtaccgcctgatccagtgctgcccaatcgatcgcgtccagtgctgtttttgccgtttccagctgagtctctaccgtcgtcttataggcaccgacttcctgcgccagctgctgcatccgggcaagttcggtactcatgccggtcagggcctcgtttagcttcgttccatcttcctccagctgtttttccgctgactccataccggacagatccagggaactcccctgcggaagctgaactgttgccaatgtattgtggagtgtcgtgaggctttctttcagcagggttgctcctgcctgtagatccccttttttctcattcatcacctgcagtccgctctccagcgctccggctccctgatccagtgctgccacaccggccagatactgattcagatacgttttgtatgtttccataccttcttccagcgctccggctccggctgaaagtttgtcggttgcttcttccagcttcttcatgttgtccgacatctcatccaccccgtccagttccttcagatccatatcttcgagaagaccggaggaaatgatcgtcgcggtaaaatccagggaaaaatccgtcacatccgcggtcacttccacatattccggaatatcaatatcttccgtcggctcatacgttgtcagtttcaggctttttgtcagtccagggcaggcatatccaacgaccagtttttgtccgtcgatatccatcacttttccgttcttcaccttgatgtcggacgcatgatcatccgacagtagcatcgtggaaatcacggcaaacgggacactgacctgctcttctttcccatcgactttgatcgtctgagtggtcttattcttataatcaaaccggatcttcagctgaccgctctttcccgccagttcttccgggtcaatcgcctgaccatcgagttcgtagctgacactcacatctaccggaagttccccgcttccggttccttcataagtgatatcctctccgtgattttcccactcgacagttccgtctgcattctgcgtgaaggcttcgtctccttctttgtttttgatatctgtcagattggtataatccttgatggtatcgccatctccggtatttttcagttttgtctgtacggtgatctcccgcggattgcctttggcatcgctttttacatagaccgtttctgtcttatctttctcttcgctgtcctgtttttttgtattttccgaaggctcggattcttctttcgtatctgctgtctcctgcatatcttctgtcttcgcagtctcctcactgtccgttgatgcgtctgactttccacatccggtcactccgacagccgcagcgacaccgacccctaacatcagacatagaatcctttctttgattttattattcatatctgctctctccctttttcagccattattctacattcttcagcgcttcatccatcggtacccggcagattctgcggtattctagtgccgccaccactgcatacgttccgattccaagaagaaacatcttaacatagaccgctgactcgatataaaatgtaatccatccactgatactctccaacatcactgcccggaacagatataccatcgcccagtattccaccggaaggctcaacaacaggaacaataccaccatgatcgatgtcgatacgatatacaaccggctgatctcccggttgctgtagccgagaatcttgaccatagaaatcgactgtgcatttttctctatgataatcttcgacagcagataaatcaggatcataaacatcaacaccgcaaatccgtccaccagtcccatcatacttcccatggaaacatccagctggcggctgattttggtaaggctttccagatcgatcactgtagaaatgtatttttcatcaatatccgtgatgggtgtctctgaaaaataaccgctaaaatacgacttatccagatcaaaggttttattcagggaatcttgtgacaaatagacagaaattccaccttcataatcatatattccattgaccgtaaaggtatactgatcgtcttcgtatttttcttttagagtgatcgtatctccttttttcagctgatacttgtccgcgtaggcggaggaaatatatgcatttccatttgatatttcttcttccggaatctgaatgtaacggctgtccggctgaataccgtacagcaggacttcctcactcttatactgatctccaagtgtattcagggaatacgcagagaatttttccgcatcttcgttgtctgtctccagctgactctgcacgtacatcatctgtaccaggctttccagtttcttatcttcgtccatcgtctccgcaggaatctgcagaatatactgataattactcagaagattgtctttcagcacactctggtaatgatccagaactgccggaagtgccagtccgaacatcaataacagatttgcaaaaagaatccctgccagaagcactacataattactcacattctgaaaaatgacacgcagacggaatcttgtaaaaaacggaatcctgctgcttagatgaaatgttctcttttttctcttctttttcaggtctcttcgcagaaactgtaacggggacagggaaagttttttatagagaattcccgcatttacaacagccatcagtgctaccggaaccagtgtcgtcttccagaacgcctccgcactccagatcgtatgataggtcggcagactgtaacttccgtaatacataccggcgcaaatatccttacataccgtgtatcccagaatattaccgatcagtgagccgaccagggtgaccaccagcggcatcgtcatataatgccggatcagttctccctttgtgtaaccggacgcccgcagcgttccgatcacattcgcctctttggtgatcgtattgctcactgtcacaccaaatacaaacgccatgatcacgatgacgatatacagaagtaccgtcatcatcgcctgatcacttcccatatcttccccggtaaagttgatcgcctggttcagatatcggggaatatatgtttctaattttgcctcatccttaatgatgtccatcagatcttctgccatctctttttcctgcagttcatccgaaggttctttctcatatttccagaaatagctgtaattttgctcttccttttccagtgccgtataaccttccggtgccacgataccgacaccaaacttgacagcatcaaacatcgtatcgctattatcggaaaacaggcaactgtaatccggcagggccacatagccggtgatcttccagctgtattttccgtccgcactctcgatcgtatccccgatctccagactgttgttgtccgcatacatacggtcgatcgcgatctcatctgcctgtgccggcagttcgcctttcatcagacagaccgtattcacttcctgtcggtttttgaaaatacgcatcgtactctcgttcgtcagtgcttcctcggtataaaagttttcatataatgtcacgcccgccgcttcgatggctttaatctgcgctttattcgccctcttttccagaagaaaattcccgttttcaacattatatttttcaaatccttcgttatacgcaatgatcatactgccatctgcaaccagaaaaccggacaccagtccgattgttgctaccagcagcaggaaaatcaccagatattttccgaattctgttttcagttcccggggcagacgttttctcagtggatttttcatcttcttcccccttaccattccaggtcctccgcatgtagccgcttctcattgatcacgttgcttcgaatcatgccgtcctttaagcgcaccacgcgggtagccatgtctttgatcgcatcgttgtgggtaaccatgataatggtattgccgtatttctcattgacggtttcgatcagcttcagaatctccttggatgtcttatagtccagcgcacctgtcggctcatcgcacagcaggatgtccggattcttgacgatggcccgtccgattgcagttcgctgctgctgacctccggataactgattcggcagtttgttgcgatgttcatagagtccaagggtatgtaacagttcgttcacatccagcggtttgtcgctcagataggcacccacttcgatgttttcccgtacggtcagattcgggatcagattatacatctggaaaatatagccaagatgctttctccggtaaatagtcagtcgtttttccttcatatctgccatccgctcaccgtgaatcacgatttctccaccatccgccctgtcgatgccgccgatgatatttaacaatgttgattttccggatcccgacggtccaaggagaacacaaaactctccctgttcgaccgcaagatcgattccctttaatacttctactttactctcgccctgtccaaaggacttcttgatttgttgtaatgtaagaaacataaacttcctccggttttcttccccattttctgattgctttcggctgcagctctctccttcagaaaaataccgcagccgtattcacatttttgtgattcgtttcaactgctttcacacagctgcggctgtttataattagtttctcctaaccattttaccactatctgttcttcttttggtttttactaatgataatttttctcatttataccattccttctgtctttctatccgagtgccacatccagaatcatcatcaggcagaatcccaccccgaaaaacagcgttccgatattcgaatgttcccccgcagacatctccgggatcagttcttccacaaccacatagatcatcgcccctgccgcaaagctgagcagataaggcagggccggaacgatcagccctgctgccaggatcgtaaccgcggcaccgatcggctccacgataccggacagcgttcctccaagaaaagcttttgactttttcatcccctgtgcccgaagcggcatggaaataatcgctccttccggaaagttctggattgcgataccgatggaaagtgccagtgctcccatggctgtaattttcgtgttaccggtcagataaccggcataaaccacaccgaccgccattccctctgggatgttgtgtaaggttaccgccaacaccagcatcgtcgtcctcgccagcctgctcttcggtccttccgccttttcactgttacggtgcagatgaggaatgatatgatccagcgccagtaaaaataaatttccgatccaaaagcccaccacagccgggatgaatgccagtcgtcccatcccttcggactgatccatcgccggaatcagaagactccataccgaagccgccaccatcacccccgccgcaaaaccggtcagtgcccgctgtaccagatcgctcagctcttttttcataaaaaatacccccgccgctcccagtgttgttcctacaaaaggaatcaaaattccaccaattacctctatattcatagtaatcttctcctctcttttaagttagtttatactaactcatttgttttttcaatttctttctgctttaacgataatctttcgcaatgtatggaggacagaaccgacaccgctggtttattctatgtatcttctgcttctcttgccatcctttttccaataccagatatatcatgcccgcgtaaagcaaaaccggtccttcggaccgatgattgatatgcaaaacaaaaccccccgtaacatggaaattcttttcccatgttacggagggttttgtttttcctctggctattcttttttacatctcatattttttcacaaacagtgcccgaatcgcattcaccactgcgatgaccataacgcccacatctgcgaagatcgccatccacatattggcaatgcccagggcaccaagcagcagacagatcagtttgataccgatggcgaaataaatattttcatatacaatatgcatacattttcttgcaatatggatcgctgtggcaatctttaacggatcatcatccatcagtacgatatcagccgcctcaatcgcggcatcggatcccatggcacccatggcaattccgatatcggctctggaaagtacaggtgcatcgttgattccatcaccgacgaatgccagtttttctttttctgactttctgtccaacagttcttctactttgcttactttatctcccggaagcagctcgccgtaaacctcctgaattcccagatcctttgccacataatctgccacatttttccggtcacctgtcagcatgatggtcttttttacaccacattttttcagctctttaatcgcctgttttgcgtggggtttcaccgtatcggaaatcagaatatgtcctgcgtatctgccgtccacagccatatgcacaactgttcctacatgactgcaggatctgtatgcaattcccagtttttccatcagtttttcatttcctactgccacagcaatgccgtctactttcgcagtaacaccgttgccactgatttcttcaatctctgtgacacgacttctgtcaatattttttccataggctttctgcagactcttgctgatcggatgagaagaggaacactctgcaagggcggcgtattccagaagttttgcatcctccaactcattatggtgtactccgcttacttcaaacacaccctgtgtcatggtaccggttttatcaaataccacatattttgtctgagacaaagtctccagatagttcgaccccttaaccagaacacctgctttacttgcaccaccgatgcctgcaaagaaacttaacggaatactgatgaccagcgcacatggacagctgataaccaggaaagtcagtgcacggtaaatccagtcgccccattccggtgacagtcccatgaaaagtatacgaaccagcggaggcaacacagccagtgccaccgcaccgtagcataccgccggagtatagtattttgcaaattttgaaataaaattctctgattttgatttctgagaacttgcattttctaccagatcaagaatcctggataccgtagattctccgaattcctttgtggtccgaatctttaacacaccagtcatattgatacatccgctgatgatctcatccccgcagtgcacattctgcggtacactctctccggtcaatgcacttgtattcagtgtggaagctccttctgccacgataccgtcaatcggcactttttctcccggctgtaccacgatgacagaaccgatctccacttcatcaggatccacctgctccagttttccatcctgttcaatatttgcataatccgggcggatatccatcagctcgctgatatttctgcggctctttccgaccgcataactctggaacaattcaccgatctgataaaacagcataactgctacgccttctttgtaatccccaaggagaatcgcaccgattgttgctaccgccatcagaaaattctcatcaaacatctgtcggtttaaaataccttttcccgcttttttcaggatatcgtatccaatgaccagatatgggatcataaacaatacgaattttacatatcctttcatcggaatcagagaaaacgcaacaaccagtactgcagctatcacaatacggatcagcatctttttctgcttcttattcatactaaagcctcctttattcattcaatgcggttactgttcaccgggtaaaaaatacagcgtaaagaaacagcttcgctttcccgggcagtttctttacgctgtcatgatatcttacagataaatctcgcagtcatcttctactttcttgcagtttttcagtacatcttgcataacagctttcggatcctgtccttcttcaaattctacactcatcttcagtgtcataaagtttacatttgcattctttacacctgctgtgttctttgctgcttcttccatcttatttgcacagtttgcgcagtctacttcgattttataggtttttttcatattatttacctttgcctttcttttctacttttgtttttaatgttatatatgagcatttgttcatatgtttgattttattatagcatcgattttctatttgtcaactgtttttccgataggatgcttgttctttttattttacaatcttcaacagtagttctgtttcttttctcttcggagcctccggcacttcttccggatagccgagtgcgatcagtgcggataccgattctgtctccgggatctgcagagcttcttttacttttgcttcttcaaagattcccatgatcacagttcccagacctttttcccaggcagccagacagaaagcttcacccgccagccctgcatcgtaggactgccagtgtgtgcccttggaagtggaaaaagaaccgtctctttcatatccggacctctcattgactgttgtctccacgatcagcaccggagcctgaccgatgatccgctgattaccggcaaatcccatcacgcaggtatcggcgatctcctgctttttcgcctggtttattatcgcgatgtagtgggctgtctgtgtatttttccagcttggtgcgtaggctgctgcgctaacaatcgcacgaatctcctcctcgcttactgcctggtctgtgaattttctggtgcttcttctctctttaatgccttttattaattccatttcctgctcctcctgttctgtacaataaagcagaaaaatcggagaacagctctttgtaaagagacattctccggttcttcgtatgttttttattatttttacattattttattcagattgtcaatcgttttcacaatgacacaccatatctcatactctgaattattccccaagctttttaccggtcagcatctcgtaaccctgcagatatttgttgatggtcttgtccacgatttcctgtggcagtgtccagttgttatccgggtttgctttcagccagtcacgggcaaactgtttgtcaaaagaaggctggccatgtcctgcttcatatccttccgccggccagaaccgggaactgtccggtgtaagcatctcatcaccgatcaccatgtttccttctgcatccagtccaaactcgaacttggtatctgcgataatgattcctttactcaatgcatactctgcacattttttatacagcgcaatggtgttgtcacgaagtttttcagccagttcctgtcctcttcccgggaagtatttttccagatgagttacgctctgttcaaaagaaatattctcatcgtgatcaccgatctctgctttggtagacggggtgtaaataggctccggcagtttatcggattctttcagtccttccggaagttcaatgccacagacttttccggttttcttatagctctcccagccacttcctgtgatatatccgcgaacgatgcactcgattggcagcatctccagtttccggcacatcatactgttaccgttgaacttttcctgctggaagaattccggcatatctttcacatctacagaaatcatgtgattaggaatgatatcctctgtcatgtcaaaccagaacttggacatctgtgtcaggacagctccttttttggtcacttcattgttcagaatcacatcaaaacagctgatacgatctgtagctaccatgatcaggctgtcaccgttatcataaatctcacgtacttttccttctttaataggtttcatttcctgcattttacacacctcatcctttttttcttagacaatgtctgatgtattttcagtacaggaaaaggctaccactatctgagggttattgtcaagactttggacggttttcacttatagtttaaaaatcgtcttttcataagcatatcttataaatatatgctacttctttagaaatttttctaaatgcttcaagaaatccgtgatgtgttcatcccaataatcccatccatgaattccttcatgttcctcatatacataatgatatggatttccttccatcccctggaaaaagtctctggtctctctggccttttcaatcagaaaatcctctgatccacaggtatgaaaaatctctggcaataccggacggtttttctgcttttctgccatatagaaggtatcttcttctgttcctctccagtcttttctgccatattttgtgaagttcatcatattccatttctgatcatcaaacataccgctgttattcggcacaggttttccgccatttgctccggctgaaaagcagccgattgcagcataccgatccggattgttgattcctatcttcattgcaccatatccacccatggaattgcctgcaataaagttgtcctctctcttttccgacagtgggaaaaactgtcgcatcagaaccggcagttcttctacaatataagtataaaatgcaccgccatgagccatatctgtataagagctcagatgggcactcggcatcacaactgccagtccaagaggtgccacatatcgttcgatggatgtccgcctctgccacgttgtctggtcatcggttgctccatgaagcagccacagtgtcggatatttctgatccgttttttctccggattccagtccgatctcattctttaccggctgcggtaagatcacatccacgcccactgccatatgaagtgcctgactgaacatttctacctgcatatatgccatatcaatctgcctcctttcggatctggtctatccagttcagaatatcctggatccagacatcccagtatttccagctgtgatctccctctgcttctttatatacataatcataatccagttccttcagtgtctggttcatctcacggttctgttcgatcagaaaatcatctacgccacaccacatataaaattttggcatcggcgtatgttcttcttttcgtttttttgccagtgcaaacaaatcgtgtttacttcctttgaatttctccggatctccaaaaatgtcctcccccagtgtgggataaaaattctcattatttaatctggcacagatatctactccaaatccaccggacagactggcaattcctgcatatttttccggacaggtaagtcccagtttgaaggcaccgtatccgcccatagaattgcctgccacaaagcagtctttcggatcattggatatacatgggaaaaatctttcacacaatgccggtaattcttccgagaaaaatgtaaagtaatcaaaaccatattgcatatcggtataccatccaagatgggcattcggcatcacaactgctatgccatgttctgctgcatatcgttcaatggaagtgtttcttgtccatatggtctggttatctgtcatcccatgaagcagatacaataccggatatttattctgtttttccacatgtccgattccgatctgcccttccgtctgctgaggaaggattacctccatctgagaactcatccccagaacttctgagaaaaaatcaacatgaatcaatgccacgttacttcacctgctttctattatttgatggcactgtctacctgaccctgtacaaatgcatcctgcaggagcagatagataatggttaacggtaaaatagctaaaactgcagacgctgccgcacctccgtagttattacctacacttgaaaaatattttttaatcgtcaatgtgaccgttaataattccggcttctgcataatatacatggagtatgcatattcattccatgcagcaacaccgtggagaattacaaccgtcgcaatgatcggcttcagctgtggcagaataatatagaaaaatgtctgtataatattagccccatctatgatgcttgcttcatccagtgcccttggtatggatgaaataaagttcgtaaacataaacacggacattggtaatccaaacgctaccagcgtaagaatcagtccccagtaactgttgatagctttcagatcaaccaggaaggtatacacaccaaccaggatcgtcagtggcgggatcatcataacccccatgaatacgttccggataaatccgttgaattttgagtcatttctggaaagtggataagctgccatgcatgccagaactacctcgatcacgatggtaaagactgcaataatcgccgaatttttaaatgctcttaagatggttccatctttaattacggaagtgtaattatctattctccacacctccggaaatcccagtgctgtggatccatctgacatgcttttaaaagactgcataaataaaacatacagcggaatcagataaatagcaatgatcaaaaatgccagcagatacttccaccagtatccttttttctgtcccgcatagcagtgggtaccctcttctatattttttttcactttttctcttgttttcattacatctccacctccttctttcggaagtatccattcaatatcagggaacaaagcaggataaacaggaacatcactacaccgaccgcggaagcgtaaccagcctgctccgctttaaagtacctgttatcgatataccaggacaacgatgaagtttcaaatcccggaccaccgccggacagagatactactacatcgtaaagtttcagtccaccgatcagattgatgacaaatgctgaagacattgccggaatcaggagaggcagtgtaatagaacggaaggtctggaaagttccagcgccatcgatcgctgccgcttcataatacatacgggaaatattctgcagacctgccatatagataaccatacagattccacagtactgccaggagttgatcagggtaataaatactcttcctactgctccggaagccatccagtcacgtccctgaagtccgaaccagccaaggatttcattgattgcaccggtattctgaaccacaaagtacataatatatcccatgatcagtccagaaatcataaccggaagatatacgatagtacggacaactttatgtcctgcaaactttgtatttaaaaacagggccagcgccagtccaaggacattttgtaaaatcgtacttccaaagccatacaggatcgtgttcagaaatgccatcttaaagttttcatccttgaacagatccagataattcttcatgcccacaaacttcttcaccggtgaatatccgttccagttataaaaggatgtctttacggatgtaaccagcggtaataacacaaacagcaacaccagtccaagcgcaggcagatataataaattcattcgtctatttctttttgtcatatgttacctccaaaaaaagctgctgccttactatgcaaagcagcagcttttttattatcagccatttgtttctaacaatgttttatagttttcctgaaaataggatgctgcctctgctacacgatcttttgctgttcctacttctccattatataattttgccatggtttcctgcataacgttccacattccgcttggaagatattcacggtcaaagaagttggaatatgtaatgttatccccagcagcttctacagattttttgtagagttccaggctttcgctgtcttccggtgttacatcactcagaccaggcattccaccattggctgtgcagtactctgtcagattgtctttttccagaaggaagttcagcagagctttgcagcagtcaatgttttcggaagtgttggaaattgccaggcaactaccttcaccaacggtatatgctgcatttccaccttcttctactgccggaaccgggatgattccaaagttgacatccggtgtatatgtcttcattgtctgaatattcgccggtgaaccccacgggataaatccataatctccgcttcccagatatttgaactgagtcgtctggtctgctgtgaagatgtcttcgttgaaccatccgttatcatacagttctgcatacagatccaggaactgggtattctttgtaaaatcaaagcttccgtctttcagtgcttctctgctctcatacggtgctccatcgatcgtatagaaagagtttaactgttccatggtaccggtcagtgtacttccgttctttcctgagataaccaatggagttgttccgtttgcttccagtttctcacaggcagccttgaaatcatcccatgtcttgatcgcataaggatcaatatcatttgcttccagcacatctgcattgtaaaccattccatatacccactgtgttaacggtgcggtacaaacttttccattttcatctgtgataaccgcttttactgcgtcatccagacggcttacccattcttctccgctcagatcttcacaaaaatcgttgtaacgaagggttgaccagccgtgagttacaaacatatccggcatatcctgagatgccatacgggtcttcatgatattttcatggtcacttccgttttgaacgacctcaacctctgctcctgtctgctggctgaactcgtcgatcagtttgttgaagcaatccagcgtattctgatcaccctggatagaatcttcaatgtctacttcgatcttaacgccatcaaaagatccgtcggaactgtctgcagatgcttcgccgctgtctgttgtctctgtactgctgctgtcatctgtctttgcatctgtctgttttccggaatctgaggaaccgcacgctccaagggttcccatcatgcttgctgccagcaatactgccaaaacttttctcttcatgtaaaatcctccttttgtgatgtgttcgctcacatctgtcttgttgctttacattttaacaggtcgatggtatactttggttataaattttagtgcacttttgttagtttttcaatgattcttgaggtatttttatgaaattaaaacgaaagatttttctgattttttctctggtcgccgtgattccgatgattttcctgactacctatacggttgtccagtatactcatatgattgataatcgtatggaagatatttcccatgagcagcaggaaaatctatcagatgctatcgatgcttcgtatacttccatccgtcaggttttcatgctgttgacctttgcaagtaacacagattcttcgattatcaaaattctgcggccttacgcagacccggaaattcatatgacgaatatggagatctaccgtgcctgtcttcaacttcgcaatgcgaatcagaatattttttatacttacgattttctgaacggtgtctatgtctatacgccttccggaaatctgatttcctatgaaacaagtaagaacggaaccattgctcagacctacaatcccaaaaatgatgactggtataatcgcaccattgaatcgggtggaaaaatgtattacagctctctggatgaacatcctatgtttgagtccaagaataaaagtatctttttttctcagaccattatcgatccggataccggtaagtttctcggtgtactcattatcgactgttctccggagcttttcaatctggattcggtcaatgcccttggtaatatgaacctgatcactctgaccaatacaaacaatcaatcagtctactataccaacgattcagatggttctttttctataaagccagatgcatccaatactctttatactgagattgatcatacgcctcttcttctcgcactcactctggattattcctctttgcgggaagattacaccagaattgcatttcttctggttatcgtctctgcgctctgtattttatgtgtattactgtttactttttatttttcgaacagtatgctccttccaatcgaagaactcagtgaacagatgctccatcagtccgatcccgttgtccactcgaaaaaggattatacctgtcggaaagatgaaatcggaaccctttaccgtcagtacgacatgatgctggaaaagttaaatgcatcgataaaaaaagattatcaggacaaactgatcgttcttgatgcacagatgaaatccctggaggcacggattaattcacactttctttttaacacgctggaatccattaacagcctggctgaaatcgacgaaaacgaagatatagccaccatgtcactggctcttggcaatatgtttcgctacgctattaagacagaaagcgaactggtaacgctggagcaggaacttcgtcatgtacaggactatgtggcaattcaatctatccggtttgataaccgtttccatttatcggttacgattccagaagaattgtatgagctaaaggtcctgaaactaattctgcagccgctggtggaaaatgcactttgccacggtcttcattattgcaccagtggtgatcagattacgattcacggatatgtagcagatcgtattcttcatatatttgtatcggataacggctgtggcatctcgctggaagaactggaacggatccggcagcatctgaatgaagaagctgtctttaccgaactcggacacagaaacaaacagagtatcggcctgaaaaatatccagtcgcggattgaattatattatggaaaaggctatggactgaccatccacagtcagctgacgcagggcaccgagattgaaatcaagatccctgtttttcagtcgaaggaggactgattgtatgtatacttatgtgattatagacgatgaaccactgattcgaagaggaacgaagaaaaaactggaacctttatctcatctgctcacctgctgtggggaggcttctgatggaagggaaggtctggaactggtccgacagttaaaacccgacatcgtaatcctggatatgcagatgccggttatggacggtacggaactacttcccgctctttctgaggaatttccttccaccgctttgatcgttatcagtggcttccaaaattttgactatatgaaacaggcgattttttccaaagtcattgactacatcttaaagccattcagcaaagatgagattcagcagactgtcttaaaaaccattgactctctgaaagataaagaagcggaagaccatcatctgacttctatggttcaggaaaaagaagaggccttctattctcttgatctgaagctgctgacagattttctgcttggctatacagataccgcacactcgtctgtcagctctcagaaactatcttttatcaatgaaatgcatcactttgtgttactgacactttattctcttccggaacaagatccactcccggtacagaactggctggagcggaatgggtttacagatcttgccctttatcttccggacggaaatacgccttcttttcattttctgattgtatttcttcctgagacctccgcagacagtgctgtctccaaccgtttactgcgtcagtttttaaacgattttcttccgtggctggaacattttcctgcctatccactggttgggatcagcgcagttcacaaagatctttcgaaactgcacactgcttatacggagtgccgggaagcactgaatatgcagcctgtaggtatttcccatacagacagttctttcttttatcagccttccgatccaccttcttctatcagctgggaaaaacaggacgaattcctttttcgtatcgaatccggcgaaggcgaggttgtccgggagatggtcgaagaactgttttcttactatcttacactcactccctgtacactctgggatgtgaaatgccattgcgaacagctgacgtatcattgtcatacggttttaaattactatctgaaaaaaactgacgattcctggaaagcttctcccaatatgcaggcaatcgtaaacaccttattttcttctgatgaagtaaaagcgtattatatgcagtttttcctgaatattacatccctgttgaagaaacaaagtgtctacaataccggcgaactgattgatcagattcagctttatatccagcgaaactatcagaaaaatatcactcaggaattcatcgcttccctcttttacctgaaccgaagctatctcagccagcttttcaaaaagcagaccggacaaaaatttgtcgactatctgaatgatattcgtatgaacaaagccaaagagctgctgatacattctgaccgtaagatgtatcaaattgcaaaaaatgtaggctacgacaatacaaaatattttttccggattttcaaaaagaaaatcggactgtcaccggagcaatatcgtgagcaatttgccgatgtgcaggcataacgagtaactaaaaaaggaaggctgttttcatgctttagcatgcaaccttccttttgctttctctattttccttcatccagcaactgtaaaaattcattttctggcatcggtttatagtaatagtatccctggatataatcacatccgttcgcccgcaggaatgctacctgttcttcggtctctgcaccctccgctaccagtcgaatccccagctgatgtgccatatcgataattgcccgcaggatactctctgactttttattcactccgatatttcgtacaaaactgatatccatcttcaggatatcaaaatcataatcctgcaacattccaaaagacgaatatccgtttccgaagtcatccagcaggatctctgcaccgttttctttcagatgcatcagcatacgggtgtgattctcgcctattgctgccagagaagtctcagtaatttcaaagcggatcttctgttcattcggattgttttttttcagtccccgcacgatccattccagcatattttcatcgtagaagtccatccaggaaagattgacggatacaggtacaaaccgtttcttttctgctcttcgctgatccagacagcctgtcactttctcaatcatatagcgatccagttcggagatatagcctcccttttccagtgccggaataaactgtccgggagaaataaatcctttctgctcatgaaaccagcgcaccagggcctcagccgatacgatttttccggttttcgcatccacgaccggctgataaaacacctgaaattcctgtttttcaatcccctcttcgaattccgaacagatttccatctcatccacataggtatctttcatatcgcttttaaaaatagcatagggtttcagatactcatctgtgatatatccctttgcaagttttgctctgtctatcataccggtgaccgacacatcattttcctggatataataaataccacaggtactgtaaatatgcatctttcttttttcttttccgtaattgaaattacaaaattctgtcagatagtcataatccagattccttgcttcgatcagacacgcaaaatgatccgattcaatcctcgaagtatcaatgggagcaaatcttgaatatatgatcctctggtaaaaccagcacagtaatttatctccaccacctacgccgagaagttcattgactgccttaaaatttttaatattaaaaaacagcagcacataatctgtttttgcaggcatctcttttaatgatcttgacacccggcggataaactcctttctgttacctccccccgttacctgatcaatataatctcgttcaaaaagtgcgatcgtgttgcgcactctggtgttaacaatccttgcatcaaaaggtctgctgaaataatcactgacccccatttcataagcgtgcccaatacattcattggatgtctctgcagatataataataaccggaagttctttcagccagttacgctgctgcatcacctgcagcacgccgaatccatccagctccggcatggtaatatccagaagtacgatagagaaactataaagtccttcctccatgattgctatggcttttttcccatcttccgcttccacaatatcatattcatcttccaaaatcccggtcagaatctcacgattcatctcggaatcatccacgatcagaatacgtctttttctcgtctgtttcatttatgtgttctccaaacaaatggtaacagccacttccctgctgcttctttcgttagtataccgattatattatactctattttcgatgcagtgtctattatttctctttatttctgcccacaggatgttactgtcgttactgttcactggcacatcctcgcgaggcacttttcactttacaggaaagcaattccccataaaaccaaaaaagccggagaactgcggaacagttctccaacctctcattttctgtttattttatttttcatctgccggtacgtctttgatgctgaagctcattcttcccatcttatccttgcccatacagatcactttgacttcatcgcccagtgtcagaacatcctctacccggttgatacgctcttttgcgatcttggagatatgaaccataccttcttttcccggtgcaaattcgataaatgcgccgaattctttgatgcttactactttaccggtgaaaatctggccttctttgtaatctgttacgatggtctggatatagtgaattgctttatccatcatcttctgatctgttccgcagatagaaactgctccgtcatctgtgatatcgatttttacaccggtctcatcgatgatcgcattaatggtttttcctctctgacctaccacatcgccgatcttttccggatcgatcttgatctgaacgatcttcggtgcgtattcattcacatgctctctcgggcctgcgatacatttttccataacttcagtcagaatatactctcttgcctgtttggtctttgcaatagcctcttcaatgatcggacgggtcagaccatggatcttgatatccatctggatcgctgtgataccatcatgtgtacctgccaccttgaaatccatatcgccgaagaaatcctccagaccctggatatcggtcagaacgatataatcatcatcggtctcgccggttaccagaccacaggagatacctgctaccggttttttgatcggtacacctgctgccatcagagacatggtagatgcacagatacttgcctgagaagtagatccgttggattcgaatgtctcagatacggtacggatcgcatatgggaattcttcctcacttggcagtaccggaaccagagctttctcagccagtgcgccatgaccgatctcacgacgtcccggtccacggctcggttttgtctcacctacagagtaggacgggaagttatagtgatgcatgtaacgttttccaacctcgaactcatccaggccatccagacgctgtccctcggacagaggagccagggtggtgatggtacagatctgtgtctgtcctcttgtaaacatggcagaaccgtgaacacgcggtacgatatccgtttctgcagccagcggacggatctgtgtgatcgcacgaccatccggacgtttgtgatctttcaggatcatcttacgaacggtctttttctgatactggtacacggcttcacccagaacagccagccattcctcattatcagcaaatgcttcttccagttttgctgtcacctgacggatattttcttctcttgtctgtttgtcatcggagaatacagctacttccatctcttccggtgttacgatctctttcatcgctgcgaacagttcttccggaaccgcacaggattcatagctgtgttttgcttttccgcagtcagctacgattttgtcgataaatgcgatgatctctttgttgaccttatcagcttcaaaaatagcttcaatcatctttgcttccggaacttcgtttgctccggcttcaatcatgatgactttttctcttgtggaagcaacagtcagtttcaggtcagattttgcattctgctccagtgtcgggttaatgatcagttcaccatcgatcatacctacctgtgttgctgcacacggtccgtcaaaaggaatatctgagatgcaggttgcgatagaggaaccaagcattgccacaacttccggattacactgtggatctacagacattaccatgttattcagtgtaacatcattacggtaatccttcgggaacagcggacgcattggacggtcaattactcgggaggtcagaatcgcatgctcggatgcttttccttctctcttgttaaatccacccgggatttttcctactgcatacattttctcttcatattctacacttaacgggaaaaaatcaattccttctcttggcttttctgatgcggttgcggtagaaagtacaacggtatcaccataatgcataaatgctgcgccattagcctgttttgccacgcggtcgatgtcaactgtcagtgttcttcctgccagttccatagaataacttttgtacatacattttctcctttttctgccctctgggcgattttttcgttactgttcacttcattctcagcaacattctgccggcggatatgctccgaaacaactgaaaaacacactccccgctgtccttatcctgctttggcaatatgcttttcagtggtctcggcatcctttccgacatcttccggtaatcgacagtatccgttgggatatattttccctttttaagctgtcttgtacagattaagataagagggatggaagaataccttccacccctcgccattcttttctctgtgcagttgaattactttctgattcctaatttttcaatcagtgcacgatatctttcgatatctgttttcttcaggtaatccagcagacctcttctctgacctaccattttcagcagacctcttctggaatgatgatctttgtggtgtgttttcagatgctctgtcagctcctggattcttgctgtcagtacagctacctgtacttccggtgaacctgtgtcgccttctgttcttgcgtattcagccataatagcctgtttcttttctttagaaatcattttgttttcctcctattttttcaatcgccacatattaagaaatggtcggagtatccgatatctgaatatgggctaactcatacttgaacagtataccatatactttcagtaatgtaaacctcttttttcgaaatattgctttcctgaaccggcatctctctgaatctgtgctttcagttcttccaccgaatcaaacttgcactccggacgcacaaagtgatagaattccacccgggcctcttccccgtacagatcctcgtcgcagtcaaacaaatacgtctctacacctgcaaacggcacttccacggtgggtttcacccccacattggagattccatagaacgttttacctttgataaaagttttcgatgcatagacaccaaagggtggtagaagttttccgtcttccggcacctgattaatcgtcggaagtccccaggtacgccccagctgtcttccatgtaccacttctcccagcacaaaataccggtagccgaggagctcattgactttctcgatatttccttcctgaagtacctcacggatccaggtgctgctgatcgggcgttcttcccgcgtctctttgcttaaaatttccacctcaaatccatattgggtacccgcctgccgtaacagttccggatttccttttctgttatgtccaaagtgaaaatccggccccaccactacatatgcggcacgcagctgtttaaccagaatttccctgataaaatcctccggctccatccggatgatttccggaacgaacggacactccaccagacagtccactccccgacgttccagaaggatcctgcgctcttcattcgtaagaatcgtccgcttgatcctggttcccagtctgacaagaggagaaacatcaaaggtaaatactaccgtttcatatccttctttgccgatttccagaacccggttgatcagtttgctgtgccccttatggacgccgtcaaattttccaagtgttaccacacttctcttatccaattgaaaatccagattttttgtaatatatttcatgtctctttccattcttctctctgtcgcaactgtttttccaattgcttttacgggacaaaacatctcacagaatattgcctgcagaatcgttacgcctcattttcttttcgataaaacattttcaccggtatcatctgatctgtctttttctcatacagtcctataaatgtttcccggctgtcatatactctgacataacctccatccaccttgagctcctcctgtaacagttccggaaaaatccggtttccgttgtgtaccagaagatcaccctgcggtgttgttttcgcagccggatactgatcgaacatcctatctaccggaagaatcaaacgttctatattaccttcttccataactttttgtacttcgtccagttttaccgcgtctgttaatccaaaccgctctacccgggtacgcagaagttcttccatgcaaccgccacatcccagtttttcaccgatatcgttacataaggtccggatatacgttcccttggaacactgcacccgaatctttactttcggaagctccatccacagaacctcaatgttatgaaaggtaaccggtctggcttttcgctccacgactttaccttcccgtgccagttcgtacagtttttttccattcactttcagtgcggaatacatcggtggaacctgctgctgttcaccctgaaatgaaagaatgcaggtgcggacttcttcttccgacacctgcactgacgactccttcaggatcgttccttccatatcctgggtatcggtggtgattcccaaccgtagcactgcctcgtattccttatcgtgatctgccagcagatcacacagttttgttccttttccaaggcagaccggcaggacaccctgtgcctgaggatccagggttcccgtatgaccgatctttttttgttttaagattccacgaagcttcgccaccacatcatgagatgtatagcctgcttctttgtatatattgattacaccgcttctttccatatgttttctttactcctgaagctgtctttctatatccagtgtcagactgtttaccacatcgaacactgatccctgcatagtacatccggctgctttcacatgacctccaccgccaaaataagaagccactcttgccacatccactttgccgttggaacgcatgctgactttatactcctgcacaccgatttcatataaaaagatggcaacctccacgccacgggtattctgtaactggttaacaataccatccatatctttcggtgtcacaccgtaaaaatccatgtctttctttctcacataacccacgatacaccgctgatccaaaagcatgatgctctccatgatcgtgcgtcccataatctgattctgtgcataggattttgtatagaaagaatccttgatgatactggtaaaatcaatgccttttgccatcagctgacctgcgatctccatggttctggttccggtacagctgtactgaaacacaccggtatcgtgaacgatcccggtatacagtgcttccgcacaggctttgttgatcttttccggctccagaagttcatagagcacttcacaggtagagcttgcgtccggaacgatctgattctcctgtgcaattcctttattcgtgatgtgatgatcgatgcacgcggttattttcgccgtattcactgcctgaccggcaacgccgatccggtctgtgctgctgacatcgaattccaggaacaggtcatattctttctcttcccattcctgtttcgcctgatcgatgtcctgaataaaatgaaatacttccggtacctcctccagataaacatctgtctggatctgtgggtaattttctttcagatacagatacattcccatgcaggagcccacgcagtcaccatccggtcttacgtgaccggcgatggctgctgtggttacaccctcaagtacagatgcaatattatttatcatcttcctcatccctttccggggtctctttatttacctcgtcaattaatctggacatatgcacaccatattcaatcgactgatccagtacaaactgaatctccggtgtgttacgaagattcagacgttttgccagctggcggcgtacataaccttccgcactgcgaagaccggcaatggtatctttcttttcttcatcggaacccatcacactgatgtatgccttgcaggttttcagatccggtgccacttccacagaagtgacggatgtcatcatatgaattctgggatctttgatctcctgacggatgatgaggcttaattctttcatcacttcgccgttaatccttgtattttttatgctgttttttctcattatctatcacctcaatccggtatgaaagcctatctcggtacttctaccatgatgtatgcttctacctgatccaattcctggatatcgttgaatccttcgaataccagaccacattcataaccagcttttacttctttcacatcatctttgaatcgtttcagagatgccagtgggccttcgaagatctgttttccttctctggagattcttaccgtacagcctctctggaatacaccatccagaacataacttccggcgatgttaccgacaccggatgctttgaagatctgacgaacttctgcatgaccgatgactttctcttcgaagacaggatcaagcatacccttcatggcagcttccacatcttcgattgcctgatagatgacacggtacagacgcaggtctacaccttcctgttctgcggttgcttttgctgtcgcgtccggacgaacgttgaaaccgatgatgatcgcgttggaggcggaagccagtgttacgtccgattcgttgatagcacctacaccaccatggatgaccttaacgacaacttcatcattagacagcttcacaagactctgctttacagcttccacagatccctgaacatcagcttttacgataagattcagttctttcaggttaccttcctgaatctggctgaacagatcatccagagacatcttcgcttttgtttcttccagcagacggttcttattttcagaaataaaggttgctgcaaagttctttgcttctttatcgttttcggtagccaccagaacttcacctgcgttcggtacatctgacagaccaagaatctctaccggcgtagacgggcctgcttctttgacacggcgtcccttatcatccatcatcgcacgtactttacctgaggaagctccggctgcgataaagtcacccacatgcagcgtacctttctgtaccaggatagtagcaaccggaccttttcctttgtcaagctgcgcctcgataaccagaccacgtgcttttctcttcggattggctttcagttcgcatacctcggaagtcagcaggatcatctccagcagttcctcgataccctggtgagtctttgcggacaccggaacgaaaatagtgcttccaccccagtcttccggaatcagttcgtactcggaaagttcctgttttactctctcgatgttggcactcggtttatctactttgttaattgcaacaatgatctcaacacctgctgcttttgcatggttgattgcttctaccgtctgcggcatcacaccatcgtctgctgcaactaccagaacagcgatatcggtggagtttgctccacgcatacgcatagcggtgaatgcctcatgtcccggagtatccaggaatgtgatcttctgtcccttgattgataccacatatgcaccgatgtgctgtgtgataccaccggcctcacggtcggttacatttgtcttacgaatcgcatccagcagtgaagttttaccatggtcaacgtgtcccataacacagacaaccggtggtcttggaacaagatccttcggatcttcctcttcctcttttaacagttcctcgatcacatccactttttcttcctgttctgcgataatatcatagtcaagtgcgatctcctgtgccttttcaaaatcgatctcatggtttaccgtaaccatagttccttccataaacagtttcttaacgatcactgccggctgcatcttcatcttttctgccagttcgcgaatcgtcattttctccggaagtgtgatttctttcactacttctttcttttcttccttcggctgaggacgggcaggtttctgcagtgctttcggcagtctgctcttctgaaaacgtccctggttcggacggttggatccctgtccgtttcttctgtcctgggtctttttctcttctctttcgcgttctttttctttatctttttctttgttctttacgtctctgaccggttttcttgccagacccagatccatactgtccatagcaggtctggaatctctgcgttcatttctgcgtccgttgttttctcttccgtcgcggtctctgttatcacggttcataccgtttctgttgttatcaaaacgacggccaccctgattgtctctgttctgattgtctctgttttgtccgtctctgtttccatcgaagcgacggcttccgtttccgccgtcctgacggttgttctgtccctgataacggttattattctggccgtttctgttatcaaagcgacggccaccctggttatctctgctctggccatcacgattctgattgtctcttcttccctgaccgttgaatcttctctcctgaccatctctgctctggccgtcacgattctgattgtctcttcttccctgaccgttgaatcttctctcctggccgtctcggttctgattatcacggttctgatatccactgcggtttccttcgccgtttcctcttgccggtctgtcctgtccgtttctgtcagactgcggtttgtttcttctgaaattcttaccttcctgggtctgtgcgttctgcggacggaatacctgaatcagatttgatttctttttcgggcggtcagctgcttcttttttctcttcttttccttcattttttccggtgaatgcatcccggaccattttttcatctttttcttccaatgtactcatatgactcttaacttctacctttttctcctttaaaaattcaataacttctttgtttgttttatttaattcctgtgcaatttcatagattcttgattttggcattctaccaccaacctttctgctccatgccaagaaatgtaattattcagatttcagctgttttttcattgctgttgccaggttttcatcagttactgccagagacgcacggaattcttttcccatggctcttcccagttcctcttttcctccgaaatcataacagggtacttcataatacgtacacatattatggaatttctttttggtattgtccgacgcttccgccgaaacgatgaccagccaggcctttcctgtctttactgctttctccgttgaaaactctccgctgacaatcttacctgccttggtggaaagtccgatcagtgatagtactttattacaattcaatcgtatccagctccctttccaggttctcataaacctcctgaggaatctgcatcttcagggaacgttccagccctttgttcttgatggctttctgcagacattcctttgagaaacaaagatatgcgccgcgaccgttttttcttccggtcacatccagtacgatttcaccttccggcgtcttcagtacacgcatcatttcctttttatttttcatctcattgcatccgatacatttccgcagcggcaccttttttatatttcccatagctatccgcctcactgttttttcaggtcttactcttcttctgtggatgtctcttccgagatctcttctgttttcggttcttcatccagttctacaccggccagagcatcttccatggaatcttcaccctcttcatcgtcagattcctgataatattcaaaatcaccggcttctcttgcctgtgtctcactcttgatatcgatcttgaagcctgtcagacgggctgccagacgggcattctgtccctctttaccgattgcaagagacagctgataatccggaacaataaccagtgcagtcttctcatccggatctgccagtacggtgatcacctttgcagggctcagtgcattctcaatcaacagtgccggattctcattccagctgatgatatcgatcttctcaccacgcagttcttccacaatagtgtttactctggcaccgttcatacctacacacgcaccgacggcatcgacatccggatcattggaccatacagcaatcttggttctggaaccggcttctcttgcgatactcttgatctctacgataccgtcttttacctctgtcacttctgcttcaaagagacgttttaccagttccggatgagttctggaaaccatgatctttggtcctttcggtgaatccttaacttccagtacatatactttgatacgttcggtcggtttgtatacttcacctttgacctgctcgttttcactcaggatcgcatctaccttacccagattcacactgacattttttcccatgtaccgctgtaccacaccggtaaccacgtctttttctttctggaaatattcatcatacagaacttttctttcttcctcacggatcttctgcagaatcacattctttgcgttctgtgtcgcgatacgtccgaactgtttggactgaatcggaacctgaacgatatcccccagttcatatttggaatccatcatcttcgcattggaaaggctgatctccatcaccggatcttctaccacctccactacggtcttgtcagcatatacgctgaactcgcaggtttcatgatcgatggtcacatgtacgttatctgcttttccaaaatggtttttacaggcctgaatcagagactgttcgatcgcttccatcagaacttctttgctgatatttttttctttttccagaatagttaacgcttccagtaattctgtgttcattttttctttatcctccttaaaaatcaaaagcaagacgaatcaatgcgatatctgctttttcaaatgtctgctctttctgatcctctgtggtgatcgtcacgctactttcatcatatgcactgaggattccgtagaattctttttctttattaatcggacgataggtacggatctctacttcttttcccatacttcttacgtaatccttttctttcttcagaggacgtccaagacccggggaacttacttccataatataagcatcttcgataaaatccagttcatccagtttatcactgaagattctgctgactgcctcacagtcatctacggtaattccgccttctttatcgatatagaaacgtaaataccagtttcctgcctctttcacatactccacatccaccagttcaaaaccaaactgatcaataatcggctgtgccatagcttccgccttctgttcgtactgttctcttacactcatgctttcaccaccttctacatgaacagcagttgctgtcctcaacaatcaaccctagagcgtgtctgaaaaatcatttccgcgatctgcaagccccactttgcggtatattttaccctcattcggttgccgtagcccgctacgccgcccgaatgagggtaaaatctcccacaaactgagactcgcagctcacgaaaagcctttttcagacacgctctgattcttcggatgttcgacccgtaattcataccatcaaacttcatcctccaactcagtgattgatactcaatgcaacaaataagagtggacgtatcgcccactcttaaaactagtcatcatctattaacatggtaatcataccatttattattataaaatgcaagcgttttcaggctttttcctttatacccgcactttcgttcctttggtgtcccgttttccaagcttgatcttattgaggaccatctgcttttctttgtattcaatctggtattccatccggctttccagaagatatgcatgttccagataatctctgtcacccatcttcattgcccggacaccaagggctgcttttttcttctccggtacttcctctttcaggaaacgcagaaaatatccagcatggctctgcagcaccacataatccatcgtgtcacacaactccacaagaaccagttcatcctcctccgtcagtttggtagaagcgatggttctcttgatcacatcgaattccgttcccggcacctgtttgatcataccggattttgtcacgaaaatcagagaagcattccttactgcctccatattgctgacacaaagcagttcttcctgtgcactggaaaaattactcaggttgtcgatcggaactcctttatctctcagccttgtaagtggcagatccatcacttttaccgtatgcatctgtcctttgttcgtaaagagacagatcttatcggtattcatacaggtaaatacatacttatattccccgtgaaccgtctctttgttcctctcgtaggtattcttatccagcaccttggcatatccgaaacgatccatcagaaaacatacttccgcttcttctactttcttttcttcaaagacagcttcttccctgttttcaatcacggtacggcgttttcttccgtaggttttcttgatgtgatccagatcttccatgatgacctgtgccatggcatcgtaattattcagaatctcttcatatctggcaatatttttcagagtttcctcatgttctgccaccagggcttcgatttccagtccgatcagcttatacagtcgcatctccagaatcgcagttgcctgtctctgggtaaagcagagtttttttgctgctttctcactggctttcgtcttgaagcggataccttcggtcacaccgtttaccagacactcttttacctgtttctggtttttacttccacgcaggatctcgatgatcagatcgatcacatcacaggctttgatcagaccctcctggatctctttcttttccagttctttatttaacagtgtctgatgctttctcgtacagacttcaaactgaaaatccacatgatgctcaatgatctgtttcaggctcagtgtttccggtcttccatctgctacagcgagcatattcacaccgaaagtatcttccagacgggtctttttatagagcatatttttcagattttccacatctgcgccttttttcagctccagaacgatccggataccttctttggaagactggttggaaatatccacaatatctgtagcttttttggattctaccagaccggctacatcatttaagaattttcctatattggctccaaccatcggatacggaatctgggtgatcacaaggttgacttttccgccttttaatttctcttcttccacttttccgcggatcttgatctttccacttccggtttcatagatcttcagaagttcatctttattgatcacgataccgccggtcggaaaatccggtcctttgatgtatctcatcagacctttcacgctgatctcattatttttcatgtaggctttcacaccgtccacgatctcgaccaggttatgtggcgggatgctggtcgccataccgaccgcgataccatccgctccgtttaacagaagattcggaacacgaaccggaagtaccaccggctctttctctgtctcatcaaagttcggcataaagtctacaacattcttatccatatcactcagatatacttcctgggtgattttttccagtcttgcttccgtatatcgcatggcagcggctccgtcaccctcaatggaaccaaaatttccatgaccgtctaccagagcctgtcccttcttaaagtcctgtgccataaccaccagggcatcatagatggaactgtcgccatgtggatgatatttacccatggtatcacctacgatacgggcgcattttcgataaggcctgtcatagcggatacccagttcatacatatcatacagggttcttctttgtaccggtttcaatccgtcacgaacatccggcaatgctcttgacacgataacactcatggcatagtcaatataagacttctgcattacctcggaatattcggttctgataatctgtccttccatgttttcctcctgattgttctatcagatatccagctgtgcattctgtgcatgctgataaataaatgcttttcggggaggtacgtccgttcccatcagtacttctgtcacgtcagatgccattctcgcatcttcaatttccacccgtttcaaaattcttgtcttcggatccagagttgtctcccataactgctgggcatccatttctcccagacctttgtagcgctgcagggtaaaggatcctgtgtgagtttttctgtatttttccaacgccttgtcatcatacagatattcctcttcccctttggaagggatcactttatacaatggcggcatagcaatgtatacatggccttcatagatcagttccggcataaaacgataaaacagagtcagcaacaaggtagaaatatgggctccgtccacatccgcatcggccatgatgataatcttgtcataccgaagctttgtaatatcaaaatcattcccatacccctcggaaaatccgcaaccaaatgcattgatcatggtcttgatttctgcattcgccagcactttatctatcgttgctttttccacattcagtatttttccacggattggtaaaatagcctgataattacggtctctggctgattttgcagagccgccggcggaatctccctcgacaataaatatttcgcatttttccggatcttttttcacacagtttgccagttttccattggaatcaaaagaatacttctgttttgtcaaaagattggtttttgccttttcttcggtcttacgaatcttggcagaacgttctgcacaggaaagaactgttttcagggtctcaagattacgatcaaagaatcgaacaatctcatctcctgtgaccttggctgtcgccttggatgcatcctgattatccagcttggtcttggtctgtccttcaaaacgaggtgccggatgtttgatagagataactgcagtcataccatttcggatatccacaccggtaaaattgctgtctttttccttcagaattcccagttctcttgcatagttgttcataaccgtggtaaacatggtcttgaaacctgtcagatgggttccgccttctgcattgtaaatgttattacaaaatccaagaacattttcatggaattcgttgatatactggaaaaccccttccaccgtaattccatcactctctcctgaaaaataaaccggatcatgaagcgtctctttttttctgttcaaatctcttacaaaaccaatgatcccctccggctcatgatagtcgataacttccggttccgtcttccgtttatcttcgaaatgaatggtcagcttaggattcagatacgcagtttcgtgaagacggctttttacctcttcctctgtaaatcttgttttttcaaaaatctccgggtccggaagaaaattgatacaggttccggtctcttttgtacgtccgatcttcggaagcagaccctcttccaactcgattaccggaattccacgctcatatcggtcatgatgtacgtatccttctctgctgactttgacgtcaagataggtagacagtgcatttaccacagaggaacctacgccgtgaagaccaccactggtcttatacgcaccgttatcaaactttccacccgcatgaagggtggtaaacaccagacgctccgcagatattcctttctcatgcattccaaccggaattccacgtccgttatctgacacggtgcaggaaccgtctgcttccagcgcaacccggatcaaatcacagtgccctgccaggtgctcatccaccgagttgtccacgatttcgtagatcagatgattgagaccttttctggaaacgctgcctatatacatacccggtctcttccggactgcctcaagaccttccagaactgagatactactggcgtcataactgtctttctttgccataatactatcctttctatcctttttctccgttatatctattctttctccccggtactttcctttggctcaagcacgggctttggctcgttgctcgcgtacataattaatcggcggtttttcatgggtactggggtacttaacgaaaactgccgattattataccatatttttatacatagaaacaagttaaaaagtactttagattgtagattcctatatttctcccttttctctcagataattcagaaacccctctgttccttcttccacatccctgtaagtttcatcgaagtctcctgtataccagggatctgctatatctcttccagatccggcaaagcttaacagtttatataccttcccttccgggtcatgattcaacatccgattcaggtttcgtatatttgcagtatccatacctataatgtaatcgaacttgtcatagtcgtctaaagtgacctgtctggctctgtgaggcaccaatggaattcccagttctctcaatttgttcactgtacctctgtgtggaggattaccgatttcttctctgcttgttgcagcactgtctataacaaacatattttccaatccaagggtgtttactttgtgggtaaatacgctctcgcttagggttgatctgcaaatattgccgtggcaaataaataatactttaatcatctttttatatctccatttaagtcttgtatttcttctcaaacgcttgatatttcagggttttccgacttttgagttttcctttcttttcaaggtatcttctcaaatcttctcgtattttcttgtgtttttccctgcaatcttggtaaatccgttggtaaagcaagcgtccttaccaacgggcttttttaactattcgctatccgatatacttcttcctttgcatcatcaaaattcacatgggtgtaagtgttcaaggttacactgatgtctgcgtgacccatgatatactgcaaggttttcggattcatcccggattttgccatattagagcaaaaggtgtgcctgcatacatgaggggtaactttcggcatctggatacggtaaatcctgttgtatttctgaatgatatgctccatgtacttctcccagtgaagggcaaccatcggcatatcgtttttatccaaaaataaaaatccagcgtatccttccaccatcggttcaacttttggtgtctttcggttggcaataattctgcgaaaacacgctgcgacagcttccgtcatcggcacatagcgaatacctttgtcagtttttggttcttcaattacatactgcatctgtgcagtacgctgtaactgatggtctaccttaatacgcatttctccaaactcaatctccgaaatcgtcagcccacagaactctgaaatacgaagccctgtgtgaaaaagaatatagattgcatcatagtatctgctgaaatgcttatcctcctgaataaacttcagcaaatctctctgctgctttcgggtaatcgcttctctggtaacagaatcattaacaatgacggatgccagctcaaattcaaatggatttttgcgaagcaggtcatcatctactgccatctgaaatgctggtctgagaactccccggatcgaatgaatggaactgtatcctcgtccatcaatttgttggagcttaatcaaccatgcctttgcgtctgacaaacgcaccttatcaattcgcagattcccaaaactctcttttttcagcatattgatgaccgttttatatccggcaaccgtattgtgacgaactcctgttttcaatgaaacatacttttctaccagttccaaaacagtatagttgccaccgttggttacgatacggtcaaacaaatccgcttcaatctgtttttctttctcacgcagggaaggctcccgcttcttcccttttggcattgggtcattcttgtccaaacgccaactgtatacatttttctcttttccgtcctcatcaatatagcggaaccgatacctcccatctttacgctggtactcgccctctcgcaaaatccgattacggttatctcgtcttttctcactcatcgtgaactctcctttcaaaaaagagagccagacttgcgctcttatcatagcacaaatccagctctccgcatagttatatcatgtgaaatcggtaaatctgtcagctctgtttacacagcagtagcctgatccagatacctctcaaatttctcacgcttaatgagggcacgattgccgttcatcacataaaaatcctcattgggatgtgtgtcaataagcgttctcaattttccttcgccgatatgataatatctggctgcttcctcaatggtaagcgtatatctacgccacaccggaatatccgagtaattttttccttcaatattcatcttattattcgccataggcagttatcctccatacatgaaaatagccagacagagggtgtcggcaacgaagtccggcaacgggcttcaaaagaccttgcaaacaatctcaatctggcgatggttactatttatacttttcttttatttttctgttgttttggttgttataagggagaaaagcccggaaataaggggttttccccggcaaccggctcggcaacgggatagcaacagggggtgcaacgggcggtcattttcagaatggaagctccatctgttctgtgacctccacaaaaccatccatcgttttttcagacgggttgccggagtccgttgccgggttttcacgctcccagcccttttgtctgccatattcggaaaacattcttgggttcgggaagtaccgccagccggtaatgcactggttcataatctcgttgatttcccggatttcccattgcttcggctcgtcaaaggtgtggttcaaggcttccttgtaaagctgcttggaacagaccatgctcccggtgtacttatcaagatacgcctgtatcattccggctttggtgtcctccggcataaaatcccgctggtgttctttgagataccgctgcatggtggggctgaaagccagcttgaacctgccgcttcggtaaatctccatagcttctgcccacatctgctcgatataggctctggaagcggcttcgtcctccaaaatgtgaacctccgcctgctccgggtacaccatgaccgggataaaacggcggttgcctgaacggtcaaggggcaggaagtcaagggcattggaagtgccgccaaacacgcactgacgggggcggtctgccgggtgggtttcatagggtatcttgtaaacctctttctgccggcttaaaaacgacttgatttcctcaatgctcttggcgttggcggttgccatcatttccgacatttcgataatccagtgaccttgcagcttacggtacacattgtcatcgtccagcttccgcaaatcatcggagaaccactcgtcccggactgccagcagacggaagaaggtggacttgccagccccctgacctccgaccagacagagcatgatttcaaacttgcaccccggctgaaaggctcgtgagatagcgcccagcaggaacagcttcaacgcttcataggtgtaatcatctgcgtcagctcccagaaagtgccgtaggcagaagcggattcgctctgtcccgtcccacacaagggaacttaaataatcccggatggggtggtacttgttttcattcgccacaatcccgatggcgttatcaatctttttctcattggtaagcccgtaggtttcttccagatagagaagcagatatttcatgtccgtatcgtttaaggcggtgctgtccctgtggaagccgatgggctttatgatgtccttgcggtcggtcaggatgttgtatgcgatagccccggaaagcagcgggtcacgctggaatacggtcaggcagttccgtatgctctgacggacaccgcctttctcggtggtttccagccccgccttgatttcctcaatgctctggggcggctgcatggcgttcatggtgttttttagttcttgctgcgtctgcggctgcaagctctgccattcgctgttcaagctgtatcacatcctttccgtattccgtaatcaaagccgctttttcctctgtttccccgaacagcagcacatccagcagatattccacatggtcttgcttctgtaaggcttccacaaaccggggatgaaagacttcctccggggagtgcggggcatattcctttctccacactcggagtaggtggagataatcggcaagaatacggaagcagcggttttttgcttcctgaaactgttcctccggggatttctgccggggcttgggcttttttgcttttcccggcggtttccagtcctcataggaaagcccgaagtcctgtgccagctgtacggcggcttctttctttcccagcccatacagggcggcggcaaaatcaatcacatccccatccgcaccgcagccgaagcagtggtaacgccgatccagcttcatgcttggggttttatcatgatggaacgggcagcaagccatcccgttccgccctacatggattccataatgctccgcagcctgtctggttgtgacggactgcttcacagcttcaaatacattcaaatctatccctccttgaaaaaagaaaaaaacacctgacattctctgattgaaaatggcaagtgcctgttaaagttccatatcctgttgtctgtgtttcgcctgtgccggggcggttctttgtgcttttttctcgtctgccttatcctgcaagacttccttgatgggctgcttcttgggcggctctttgctttcctctgtgccgggtgtggctttccgtacccagtagcggatgtcccgcagcttcttcaaatcagcctgtacctcgatcagaggtgttttcagggctgcaatttcttccagaagcgtttcctgctcctcttgcagcttcttttgggtgctgtccttatcgtccgggtgcttggcaaggtaggcggcggctttcgcataccgggcaacctccgggtgttcctggttgaatttctcctttgttttcttaaaaaatatcttctggtacttctcatagacaggcttacattccttgcagtctgtccgggcagaaagcagtccgtcaatcactttgcttcgggcttcctttggcttcatctgactgcggtaatctgcggctgatttcccggaagattccagaaaggcttccaagtcctccacagtggaaagccccttttgccggagataggacagggcttcgctgactgcctttaagtcctgtgaagtcccccggttttgtccagccctcgtccagtccttccgttcttcctttcgtatctccatatatttcatcagtagatttggaagaagtgtcgcttcctccgccgccttttgtgcaagcagttctttccgtttttctcccagctcggtaatccagcctttgaggttttggataagctgccggatggacttcatcaggcggttggcggctctgatttcccggttcaggttgccgatattcgtctggatacctcgcttttccatctgccggacagcagcaccctcatggacagtagggataatatcaagcccctgtctggcataggaacgcaagtccacacgctccgggcgatcattggcttccagatagcggttctggatgacctcccattcatgccgccagatttcacaatacttctggtcgttccagtccaccgtatcctccttgtggcttttccacctgccggatggcagctttatccgttccccgttctcgtcaaggtcataaaccttgcggctcttggaaagccatttcccatgttcgtccattgccctcatagtgagcaggacatgggcgtgaggattgtgtcccggcgggtgggggtcatggatggcaaagtcagcaatcatacctttggaaacaaactgctgttcacaaaactcccggacaaggacagcgtactggtcaggcggtatctctctggggatggtaagcacccaccgccttgcaagctgggagttccattgtttctccaccgcttcggcggcgttccatagagtattgcggtctgcatacgaccgtggggcatttgccgggagcaggatttcattgtggacgataccacgcttttccgggtagtgcttcacttgctggtcgtattcacagaacagcttttcgccactctggtaagcagcggcggcaaccgcagactgccgctggctgcgctgaacaatcgtgatttcgttgtgtggacagggcatttcgtgtccctcctttcgtatatggtaaataactcgtcctcccgaaaaagatatgccagcccgaaggctggcactgagctttaccttgatttagtttttcgacagtgatccggcagttcttcagaccatggcattaaagtttttaacacctctgttggaacatcgtttcgtggatacttcacaagttctgtcaacaggtagcagaagtactcgtatggtttcaggctgtttgccttggcactttctgcaatactgtataagagagcactcgctttggctccttttgtagaatcaatgatatgccaggaatgttttccaacgcagaaagacttgatactacgctctgcatcgttgttatccagcggaagaagcggatcttccaggaatcttcgaaggtatatttcctgattgatcgaataattgattgcttcttttaacttggagcttgcgtttgattttccctgtaatgttttcagccacgcaaaataggcatcgacaagaggctttacagagcgctgtctgttatctaatctctcttttgccgatgattctttatacatgttgtccaaatgatacatcgcgtcaatccgtttgactgcttcagcagcaactgcctgtcctggcgtgagcggcgtattcttcttcacaacttttatgatctctgtgaatttacgtcttgcatgagcataacatccggccacctggatcctatcactttttttcataagcgtatgatacggctggtaaccatcggttacgagtgtcccttgatatccggatagatatttttccaggacttcgccgcttctgccacccagatattcatataggaagagtggatgggtatcgcttccaccaggagaatggaacacccacatatattccttgctgtgctgaggcatgataaatggtgtttcatcacaatggatatggtgggattccataatctctgctttcatcagatcatgaaccggctgcagataatactcactgagacggatcatccatcctgccatatcctgccgcggaatgttgacatcatttcgaaggaattcttcagaaagacggttcaaaggtaccgcatttacatactttgcattaaacacggcagctgccagttccggggtaagaatactatgtgccagcagacgttccggtgcttttgcacgcagaaaactgccgcaatcagaattcccggcatatactttgatatgatgttccaatactttaaatctggctggaatatactgaagttctttatatacttcatcttccataggatgccatccttttggaaagtgttcccgtaattcttcttcggaacaatcgtggttgatcacttcaacttcgatgtcctgaagattcaggtcacgttttcctttggttctctttctgcggacaacggctttttcaatgtcaggttcatcaggaataccgttttctacaagtgcctctgcttcattcaggacacacatgttttcaagagaaaacgacagttgtcccataacctgtttgtcagtttccgttctttttccaaaacgctgttgtgtcaggatcgcaatctgttcctgaagatcttcaatctgatggatcagcctttcattctgatcctggatcttctggctctgtgcagataaaatcgtaaagctttcgctcatctgtatgtacagcaatgctatggcattcttcggcatcttattcagttcgtccagggttaaagtaatgttttccatgaatccattataccacagatggcactgaaaaaccctttatttcaggcatttcagggaaatttagataacttataaaactgtcaatgtacatatataaaacagaactaataaagctctggtttcaccttgtgtattacttttttctgttcaatggaaagtccttccatcagccatcggtactgttgaggggtaaggtctctggcttctttttcacttcttggccattgaagttttccatcggtaaatcttttatagcatagaagccagccatcgccttcgtagagtaagactttcatccggtcatttctgcgtccacagaacagaaagatggatcccgcttcggttggatccaggccaaatgttccagtaacaatagagatcaatccatcaattccttttcggagatccgtatatccggtacataagtaaacgtgttggaagccggaagcatcattgagcatgacgtatgatttccagcattctggatattagttctgatgacgagttttcgttcacacagaactcaatctcatttattttaataatcatctgagtttcaaatgcagaggttcctttttcaattgttttggctggtatctgttctgatgtcagagcaggaagttctacaaaaccagcctgtgttaaagctgcttcttttactttacgcagccaataataataggcatctctggataacccgtgctgttcacaataaatatcaactttctggccactggctttgcagtcttttataattgcagcccattcgttcaatcggatttgtctggtggctaacttggtgttcatgatcaatacctcctgtggtgtttttcgtaaaaagtgtgaaacacactttttacactctacacaccattatcccagattttggagatgtcaggaagttgacgggttattcaccatttacctcctttcggtaattggtggatggggtggcgttttgccacctcattttgggcagaaaaaaagcaggcaacctttttcagatttcctgcttggtgtgccgctgtgtgggcggcgggtatttagttgtaagagtttggggttactttttgacttcctttgtgatttcagttgtctctaactgtacccgataagtgctttcttctccgttcaaattggttgttttcaattcaaaccacaaattatcagtcaacttatcagcgtcactatctctgagaatgtcaccagaaatttgtccaacatttccagaaacatctattgtctcacctgtctgatcatcaacaccattagaaagcagagtttctttttcgcttccattgatataaatggtcgttgagtatgtggtaatattagcaaaatcgtctgacatcactttcaaatcaccaccatagcaaatttcatctttgccatctaaaataattacaccattcgacacagaaatatattcattttctccgctaaatgaatatacctttaaggactgttcttcattgctttcggaggaagtgttgcaccctgcaagcagaaccgtacaagcaagcaacgatagcataactgccattatctttttcataatatcaccatcccatcaaatttcaatttttcagttctacaagttggaagttgtttatccaaaatgaaatggaataaccatatcaagtaaaactgcaagaactatactaatcgttcccattagcgcagaactcctcaatgtgtctctcctcaaaacaataagtccaataataaagactatcacttccaaaacagattttgcattaaaataccagcatccatatacaaagcacatattgaacaatactgccaaaatcagcgctgatagtataaatgccagtttgcttttcccctttgcataccaacagacaaaagccaataatggagaaacagctgtaaatccaaaccaaatcatcgcataacttcttgggaaaaatcctgcaatatagtttgaatacaaatagtagcttgcaaccataccaacaaagaatacaaaaacattgatgcttgctcttattgcagaattgctataaatagaaatacacagtgcaatcaatatccagattgcaaaacgcccaagaaaattaccaatatctaagactccatttattgccataagcacacctggaagttcagtttgacgaaaatccagatattttgagaaagttcccaaagctattccgagaaacaatatcgctatggtatttataagttttctattattggatattggattttctgcattccttatatcattcaaaaaatttatcataattaccctcacaaatttcaattttctcaattctccagtcgagtagactaagacctctcaatcttagcccctcacagatccgtacgtgcggctttcccgcatacggctcctcatagtaacattcgcttcaatataaacaatagtacgttttaggttttgctaacgggtaatacttgagcatttccacaaatccattccatgtgtatgcccgtctacaacctctccgattcatggctttgaatagaaactgttgtactctatgcaggaatgttgttatcttccgaaaattccatgtaacaccataataccgatagtgtccaattagttttacgttcaactctttaattatttctcgcattggtcgatttcgattatcgtaaatccagttcttgtatgctctaaccttttgctctaacttctttcttgaagtctgtacctttggcacgaaacctccctttcgagttttgctacaatagaaggtaaaccccagaaaatcaaatgtttcaggtttacattctcctcttgctctacgattctgctctgcaaatctcccaaattcaattagtctgcttttactactttccagctccagtccaaacttttccattcgttcctttaactctttatagtatctttcagcttctgacttatattgaaatcctgcaacaaaatcatccgcaaagttgacgagaaaacactctccctgcatttccctttgcaccaccagcttaaaccacagcgtcagcacatgatgcatgtatatatttgcaagcatcggactcattgctgagccttgtgccgaaccttcctctgttggctcgaattttccttgctccattattcctgctttaaggtatttacgtattagccacaataagttcttatcctgtatattccattcaaggaacttcatcatccaatcatggtcgatatggtcaaagaaacctttgatatcggcatctacgatatagctgatttttccatagcttatccgttggtatacttcttttattgcttcgtgacaccccctattcggtctgaatccatacatgcagtttaggaatctcggttcataaatagctcccagtattttcttcactgccatttgtacaatcttatcttcataggaagcaatccctaatggtcgtttctttccatttcctttaggtatatataccctcagtgacggaagtggcttaaaggatttgtttttcaacctctgtaccagttccttgatatttctatcaaggttcttcccatactcatccttagttaccttgtcaattccgactgctttgttcccatctaattccttatggcattgctttagcatatcttcatttatcaagtggtacactgatgtaaatataggatgttttgatgttgctgatatctcagctattcttactaatttcgtttccattatttcctccgtccctgagtacggataatgtgtcctcagtaagacctttactatgcaatccccttccctccatcggcattgcccgatttctacagtactatgggattgtccgaccacctaccattcatttgaaatactccgttttcagttgcaatttcatactcttcttcgagaaatggcaggttctccccagttgatgtgtattcacaatgtaaaacatgattggttctctgactccgcagtgccacataacactcgccatatcgcattacatgatattgtcttccgcaccagttaagacgtcgaccgactgaagttaacgtttcgaagctcaatcactattcaaccctgctttcttgctgtctacgcttgtcagatgccgttaccggcatcatcccaagactcgctattatctggttggctaaaccttggataaaccggaatcccaccggcttgactacacacccttagctgggcgcacaactggaatttgtaattacattccatacatattggcattctttacaatcactctatctcctttttctaattgttccttagaaactcctcttaacccaagtccaacatgttctgttttatatccacaaccatttgattttcgttcttttgtatgtatatcgatggtagtaattatagtctctaatacaccttcatttgttttataaacacacgcattttctccttctctacacattcctgttgatatgtttcctgtggcaactgttccaacccccataattgtaaatacatcatcaataatcaattcaaagtcttcttttaaacataatggaacatctaatctgttcatatactctttttctcgctcttttttgtttttaccaaataatcccatagtgtttctcctttataacttctgatttattgctgacttcattatactttattgcctatcgaaaagatagcatattttatgaaacttgtcggctgggaacagcttgcagcgcaaggtgtccccagatggcaagtccacaaaagggtagctggtggcagccagcgcaggggaagcgtagcgtcccctgtatgatttggagcagaccatgactgcggaaaatcacagccctccggcgaggagccttcggagaacgcaatgcaccaacctctgggtggtgtataattgcgcccttagtaaactaaggggtttccggcttcttccgttccagcagttttttcaatagttcctgcgtgtcctgtctgtgaaaaatgaggttcaataacagcatgacatcatcatctgtcaggcgttccggctcttgcagaaaactttccagcataccgccacgagtacagagccggtgcgtccgttcctttcgggtaagctgcttcaactggtgctgtaatgccttttcatcattgatggctttccgcagtttcttttcacttttttccagctcccggttgagcttttccagctttgaggtatcaggcaagggcagcgtcctcctttcccggtatcagcacataaattctgttgggttctccaacgccctgacgcacccgcatgataagtccgacagtttccagttcattcagagaacgcttgaccgtcatggggctgcgggacaggacagcggcaatagctgtgacagggaagcagacaaacaagattccgttctcgtcctcttgcccgttggagagcgtagcgtccaacatccggcagtacatgacctttgcggtactgctgactggaaaccctgtcaatgctctgggaaatggcatacagggcggcaacggtgtgtctatcgtcataaattcaaaattcattcggtgtgttcctcctttttctttgctcgtttggataaataacgggggcagtcaaccacaaccgcccggaagctctgcctgcacccatgctgacatttccggcataattcgttgtaagtgacacgcccccggtcattgaggtaaaaagaaagctcatgcttcctctttttgctcattctcggcatattgcgcttcctcccgttttagtgtatggtttcggggcgattttcggcaaaattacgctcatagagccgcttaaaatctcccgaagtatcagcgatagggtagactatccccctatcagattgtcgtgtttcggtatcatttcggtgtcagttcgccagttctctccggtgtcgttcctcccctgaatctcacagcggcgtatcgctccctttggtacgctcgttttggtcaggattcctccacatccctgccaaaagtcatggcgctacatcgccggggaagcatatcccacacaggctggtcattcgattggaataatccatcgatgaactacctgtatcatagaacatttttgtgccctgtgccgtatgtccacaaagtaggaattaggggtaaaaatcagaaatttccacgattgcggaattgatatggtataatcaattcaacggttataaatgtcgttagaaagggggaactgcttcaatgaacggagctactacaatacaggaacggctaaaagatttacgattaaacaaaggattaaaactggaagaactggctgagcaaacgggtatttcaaaatcggctcttggcagttatgaaaaagacgactataaggaaatcaatcatggcaaccttatcctgctggcagatttttatggggtgtccctcgattatctcttttgccggacagagaaccgggcggagatcaacacgccattaagggagctgcatttgagtgatgagatggtagcacttctgaaaagcggtcggattaacaaccgtctgctctgcgaacttgccacccataaggattttatcaagtttcttgcagatattgagatttatgtggatgggattgccaccatgcagattcagaacctcaacgctcttgtcgataccgtccggcatgaaatcattgaacggtatcgccccggcgaagatgacccccatttgaaagtactgcaagccgcccatatcagcgatgatgaatatttcagccacatggttctggatgacctcaacctcattatccgggatattcgggaagcccataaaaaggacagcgagagtgcaccccagaccaccgttgctgatgaactgaaagaaaatctggaagcggtcgaaaatttcaagggcagccgggatgaaaagctcgttgtactttactgcaagcagcttggtatcaactataaaaatctgtcagacgaagaatttcgctggctgattcggattcttaaaaaatcaaagaaaatggggacgtcaatcagccagaggaaaaaacggtaaagaaaaaccgctgttgcatggtttgttagcttccatgtagcagcggtttgtgctgtggttattcagttaaattttcagaatgacaagttggaacttagaagttactatttgacttcctttgtgatttcagttgtctctaattgcacttgataagtgttttcttctcctctcaaattggttgttttcaattcaaaccacaaattatccgtcaacttatcagcatctctatctttgagaatgtcaccataaatttttccaatatttccagataaatctattgccccacctgtctggtcatcaacactattagaaagcaaaggttctttttcacttccattgatataaatggtagttgaatatgtggtaatatcgccaaaatcatctgatgtcactttcaaatcgccaccatagcaaatttcatctttgccatctaaaataattacaccattcgacacagaaatatattcattttctccgctaaatgaatatacctttaaggactgttcttcattgttttcggaggaaatgttgcaccctgcaagcagaaccgcacaagcaagcaacgataacgtagctgccattatttttttcataaaattgtctccttgtcaaacttgaaattatttaattctctgtgtacctaattgtaattgttcaactgctatttttgctttattgtcatcttccttttggagattttctatttccgaactccgaatagtcaaaatgatttcgtcccccacctgtaaatcatcaagagttatatctacaacatcttgtgtatcataattacaataaatcataggaatttgggaacaatcaataagacaatcatcccctaaaacaccttcttctccgctatcttttgtggttatgattttattttctttatcaatttctgttattatcgcattgacacctaaagtaagtggttcgtttgtttgttgtccagaacacgcaactaaagtaaacgcacaaatgaatatacataatgccattatcatttttttcatcataagttcctccaaattccgatttttgttctatttgctccccgatatactggaattgatttactttgtttgtaaatcttccagaaagaaaattccctctgttaggttgataaacatatccttgtccttgattacatgaattttattgttccaccagacagtagtgttattagcggagattgttttgcttgttccatccttaagaaaataagtaattgtaatagtaggttcttcttcgctattcactttctcaaataaatcatatttcagaaatcccgttagctttaaggctaattcaatatcctcacggcttgaaatttctttaacatcatctgtgacactcggatacgtgatatttacagactgaatattatttatgcgaggcaatctccaaagatacataccattcgtaaatatgttgattccaacaatcaaaactgtcataactatcacttctatcaaaaattgaataagacatttgaaaatcttgttcatctatttatcctccaatcttgatttctcctacttccaaaatcccgttttgtcataatcattctatcacaccgttatgaataaatcctctcatgcaaaataatttcttctgcccggttgtgaatgttattgcaacgctgcacccattccatttgagaagtgcgctttaattcctctgtcacgccctcggcagctttcatctgttccatgatagtgtctaaccgttcctgtgcctgttcgttcaggtctgcaagatatgtccatagctctccggtcagtatcaatgtgttcaatctggctgggtggacttctcttaaatattcccggtgcatccgtccatactttccgatggggcggtgttcttccggcagcttcaagtctgggatgtagtaatctccgacaaggatataatcaattccgttttccgttattcttggtttcaattcgctcatatttttaatctcctcattctggcccatttttttgcaagtctgactctccagaaatattggtaaatctttggtaaatttgagatcgaaacacaaaaaacgcttaaaatcgagggttatgagacgatttgagacgtttcatcatgcccggtaaatcctgccgtggcagataaagagcacttttatcattgttgcataacctcgcatttcttagtttttcttgatatttcgggctttgtaagcctttgtaaatttttgctttctggcataacctggtttattttcgcataatatcgtcagcaaaaggtgtaaaataaggtgtatgtttttccattttacaccttgctattttcaattaaaaatcgtaattacacaacctgaatccgggcaacttcttccctggcatcctcaagatttacatgcgtatatgtattcagcgttacgctgatgtctgagtggcccatcaaatattgcaatgcttttggattcattccggattttgccatatttgagcaataggtgtgtcggcatacatgcggtgtaatgacaggcatctgtactttgtgagtattattatacttctgaatgatgtgttggaaataatgctcccagtgcagggaataacagatactttcatttttatcaaagtataagaatccactttttccatctaccataggttctgctttgggtgggtttcgtttttctattattttccgaaagcattcctctacatctgcagtcataggtatctttctcgttccgctggttgttttagtctcgtgaatataatatccgatttttgattttttctgcaattgatgatcgatgttaatcgtatgctccttaaaatcaatgtcagaaatggtcaaaccacaaaattccgagatgcgaaggccggttttaaataatatgtaaatcccctcataatacctgcaaaaatgaggatcctccttcacaaactttgggatactcccgaaaaaatgtaaattggttttccttcctaagaatcaggatttttcactttctgccttgttgtaaaacaagctggtatcgaattgataccagctaatgttttatacgctatacccaaagttcagaaagaacccaattcataccctgaaaaaactctcatttgtactttctcctgttgtcattctctgttgtaacatttttatcagagtatatcataaagcaatatactttctcaacaataccctgacgttttcttttattttacagaagtacttaattttaacttttttccttcagatttttatattacaaaaatcatatcaccagctgcagtatatcctctatatgttctgcaagatgatctgccccattcagtttccctttctcaccatatccatacaggcatcctataaaagggcttttgcaggctctggcacattccagatcctgccttctgtctccgaccaccagataggggcctgcatattcccagatgatctcctgcacaatttctgtctttggacggaatccgtatgattcacagtcataaaaacggtcaaaccatcgttccatcccaaattccttccagtgtgcctcacgatatgaagctttacagttacttaagattataagatgatatctccggttcttcaaagctgttagcatctcctctgctcctggataccacactgccttatgtttcctgatctgtcttatcatcaggtctcctaccatcctgtttgcctgctctttatagctctgatccagctccggcaaaaatgtattccacatttccttactgttaagtcccagccatccggcaatttccgccgagcctatctcccgttcttctgcagctttctgttctgtcagccactgataggtttcacgaaatgccggttcatagattccaagggtattatggatcgttccatcataatcgaatatgatcgtttttgtcatcatttattttcctgtcttttagagctgcttcatcagattgaccatctcaattgcagataacgcgcagtcataacctttatttcccgctttgcttcctgcacgtgcaatagcctgctcgatattttcagtcgtgatcactccgaataagaccgggattcctgttgcaagttcaacctgtgcgattcccttagcagattcattgcataccagatcataatgtgaagtatctccacggatgacagctcccacgcagataattgcatcatattttcctgactgcgccattttctgtgctgtaatcggaatctcaaatgctcccggtacccatgctgcagtaatattctcttcttctactccatgtcttaccagtccgtcgactgcccctcccaataatttattcacaatgatctcattgaatctcgctgccacgataccaaccttcattccctccggtgctactacttttccttctactaaattgatctgtctcattttttcttcctcctgatatttgctgttttttataaatttatttctttaaaaatatgacccatcttttcctgcttcgtcttcatatacttccggtcatacttttgtaccggaatctccagaggtactctctcattgatcttcagcccgaattcaccaagtccataaactttatccgggttatttgtcagtaatcttaatgatttcacaccaaggtctgacagtatctgtgccccgacccagtactctctgagatccggtgcaaatcctaacttcacattagcctccacagtatcgtatccctgttcctgaagcgcatatgctttgatcttattgatcaatccgattcctctgccttcctgtctcatatacagaatgattcctctgccttccgcctctacctggcgcattgctgtctgcagctgcaagccgcagtcacatctgagcgatccgaatgaatctcctgtcaggcactccgaatgtacccggcaaagcacatcctcaccatctcctatatcaccttttaccagtgccagatggtgctctcctgtaatgtcattgatatatccatacattttaaaatcaccgtactgtgttgggaggtttgcagctgcttcctcctttacatgcttttcatgtatccttatataatcctgcagatcacggatggtaataaatgtaaggttatgctcttttgccatttcccatagctgtgatgtacgcatcatcgtgccatcttctttcataacttcacagcacacaccacattctttcagcccggcaagtctcataagatctgtcgttgcctctgtatggccattccgtaccagaaccccgccttttctggaaataagtggaaatacatgtcctggtcttctgaaatcctccggtttcgactcatcatccacacacttcataatggtataggagcgctctactgctgagataccggtcgttgtatctgcgtgatccactgccacggtaaatgctgtactgtgattgtccgtattttcagcaaccatcggtggaaaattcaatctcgcagcaagttccgcactcatcggtgtacagataagaccctttgcataggtcgccatgaaattaatattttccctggtcgcaaactctgccgcgcatatcagatctccctcattttctctgtccggatcatctgtgaccagaactattttaccttccttaagattcctaagtgcctcttcaattgtgttgtactgatagttttgtgacatactgtatatcctcctgttctaaaatccgaattcttcaagaaattccatcgtaattccggattcttttttctcttcttcgttttttctgatgccaagcagtttttctacgtattttccgatcacatcattttccagattaaccagatcccccggcaccttttccaaaagagtggtttcttctcctgtatgtggaatgaccgacacctgaaaaccagcttcatcaacccttgcaactgtcaggctgatcccatcaatacagacggatcctttttccacgatcagatgcaaaatctgtggcgatgtctcaattgatacccagatggcattttcttcccggagcatggaacgtatcacgccagtcccatcaatatggccgcttactatgtgtcccccgaacctgccgtctgcagccattgcacgttccaggtttacctggcttccggccttgcagctgccaagactgcttcttctgattgtctctgccatcacatcggcagtaaatccgtccggctgaatcgacgtaactgtcagacacacaccattcacagcgatactgtcaccgatccttgtcccttccaggactttccgggctttcactgccaggattcctgattcccctgtcagctgtatataacggacttttcctttctcttctacgattcctgtaaacatgattcctcctgttttttctcacacacctgacatcttatccggatgtcctcaccgatctgacagatatctgtatatctcagttccactgcttcagacggcagttcaactccaataccttctaccggtgtcttcccagccacaccgccaaacagctttggtgccacaaaagcctgtacttcctttacaattccagctctcagtgcactgtcatttaacgtaccgcctccctccagaaggatgctgtcaatgcctctgtttccaagatctgtcatcagcttcttaaggtctatctgattcttttcatccggacaacaaatggtttcaactcccatggtatgtaatatttttattttctcttctgtatttttccaatctgcataagccacgatcgtccggtattttcccgcactttttacgatctgactgtccggcgtgatcctgagcttactgtcgcacacaatcctgacaggacttttccagccttctacccggacgtttaacatcggatcatctgcaagcacagttccaatgcctgccatgatccccatgtactgatgccgcatatgctgtacttcttttcgtgcagcttctccggtgatccattttgatgcccctgtcttcgttgcgatcttcccatccagtgtcatggcatacttcatcactacatacggagtcttcgtagtaatataatggaaaaacaccgggttcagctgatcacattcttctctcataaaatcttcaactactgttacaccggcttcccttaacatctgtacaccttttcctgccactttcggattcggatctctggaaccgatcaccacttttctgatcttctgttcaatgatcgcttccgtacatggaggtgttttaccatgatgacagcaaggctccagcgtaacataaatcaccgcaccttctgctgattctgtaagagaagcaattgcattacgttccgcgtgaagttctccatactttttatgatagccttccccgatgatctttccgtcttttacgatcactgcccctaccatcggattgggattcgtccagccttctcctttttgggccagctgaatcgcccgaagcatatattcctgatccgtcatttctattccttctttcttattcctgttctttgcctggtatttcgaaaacgatgtaccagatacaaaaaaagcctgcagaaatatctgcagggtggaattaatctgttacatatgatcgataaatgaatgtctgattatttcctacataaaaagctctgaaatggatcaccatctcagagctctgatactacattcattcatacaaaaatcaactgtactatcctcttcttccatccagactgtactgtcggccccggaatctcaccggatcatgcctctcggctcgcgggctttaccgccggtagggaatctcaccctgccctgaagatatctttttgttcattttaatactttatctattatttgtaaagcagaatttttattttacgcatttcacatttttctcgggagtttgacagttgaataatcaaaactcaccctgcaggccttataaaacctgcatttttatgtcaaatatattggattcaatatacatatccgttcctccaggacatacccacaattattggcggagaaattcaggcacgaaaaaagtcccagtagttttttgatggttcttatatgtttttttgtatctcatccgttcgacaaactgcaatttctcaacttctttagttttcttcaaattcatccaatcgttgtttcaatataaaaatttgcatccttatctcatcaataaccttcttaaattcttcgtcactctttccggttggatcttcaagtccccaattatcatcaaacggtcttccgataaacggacatcccacattacaacccattgaaattgcaatatccggtactggtatctcatcaatcagcttactatattgtccttctgcttctatatcaattccatacaattctttcataatccggactgcatcctgattaatctgtggtttcgtttctgtccctgccgaataactttcaaatacatccgaagccagatgttttcccaaagcttctgcaatctggcttctgcatgaattatgaacgcatataaaagcaacttttttcttattcatacttgaacttctcctctaatttgtttgcaatcttcacaagagtaagcattaccgggacttctgttaatacacctactgtagttgccagtgccgctggacttgatgtaccaaataaagctacagcgactgcaacagctaactcaaagaaattcgatgcaccaatcattccagccggggctgcaatatcatacggaagtctgataattctgcatattccaaatgccagaaagaatataaagaatgtctgaatgatcagcggaactgcaatcaatataatgtgcagtggattgtccagcaccacctcgccctgaaacataaaaatcagtatcagcgtgagcaaaagtcccactgttgttgcggaatcaaatttatgcagaaaagtctgctcaaagtattccgtacctttctttctgactaccagcagccttgttatgattccggctgcaagtggtattactacaaatagaaccacactcataaataacgtctgaaacggaacactaacattagaaacaccaagcagaaatttcataatcggtacaaatgcaaataatataataatgtcatttgatgccacctgaactactgtataagccggatttccctttgtcagcgtactccagacaaataccatagcggtacatggagctgctccgagaagcacggctcctgcgagatactccgtcgcaagatccggtgtgatccatgtcttaaacaccacaaaaaagaaaaatgatgcaattccatacatagtaaaaggctttattagccagtttacaattcatgtaacaaataaacctttcgggtttttcccgatatttttaatactcttgaagtcaaccttcatcatcattggatagatcataatccatataagaactgccaccggaatagaaattcctgcatattccagatggttcagtgcctctttcattcccggaagaaaatgtcccaacataattcctataagcatacagacaattacccatacagtcaggtaacgctggaaaaaactaattcctgaatttgattcttttttcatgatatctgctctccttaaattatttacaacaatccccgtcaccgcatccaaggcaagtaagggattctataaattgtttgtaattcatcaatgtctcacaattcaaagaatagtgatgccattttccttccttacgatcattcacaaggccgcatcctaccagtatcttcatatgatgggataaagttggctgggtaatttcaaatctttccaaaagtttacacccgcacttttctccatccgacagcatctgtacaatttccagccggttcgcctcgcccaaagccttgcatatcaaagctacatccattgtattcatattgacacctcacattgatcattatctatgttcaatataatatatacatagatatttgtcaatgtatgtattttaaaaaaagagaatcaagtttttgattctcttcatacattcattatagcttttatcatccattttatttgccccaaacagccgctgcattcgaccttacaagcagttcttccacaggcagaccaatcggacaaatatcatgacaagataacgacttcccgcatccctcaaaatatttcttcttatattcagcagaaatctcattcaaatgagtgctttcctgttcttcattcagaatccgaaatgcgttgactgcagcaacagcgcctgcgaaagtcccatttgcagagaagttaggacacacttcaaggcagcagccacacatcagacagcgtgccgactgatatctcggttcatgtgtccacggattcatataagcttcactttcaagccaaagattcagttttttcaaattttcaaacagaattgaccggtcaacgatcaaatctcttacaagcggaaatttgcttaaaggttccaaggtgattgtagaaccttttaacgtatgtagaaatgtagagcatgccagcctcggacgttcgttaatcagcatggcgcaagccccacattttcgcaccatacagctacattcccagctgatgggagtaactatattccccgaattatctttcaaaggggttctactgttcaattcctttagaacattggcaacagagctgtttttgcttccgtcaaactcaaattcctgccaataactgtctgatttctgactctcctgccgcctgattcttattttatataccaagtgaatcaccgcctttctggaacaggtacaaaggaaatctgtatctgttttccatcaaatctggctaccgttgttttaaggtaatcatcgtcattgctcttcggataatcctcccgccagtgtgcaccacggctttcttttcttgcaagagcactctttagaactgccatgccaagcaatggaagatttcctgtcagcgcttgtaccgtttgaatcccatttaacaacgtattctcatttctgacaacgcccatagtctcctgcatcactttgtttaattgctttatttctgaaatttgagacgctggtggaaaatctatctgtgtcgcacaagatagatctactacatctgcctgttcgcatgctgattttgccgcaacacgtcctccgtataacgctcctaacagagaatttccaccaagacggttggcaccatgatattgggcacagcattctcctgcagcgcaaagattctgaatcggcgttctgtgctgctcatccaccagaatgcctcccataaaatagtgaattcccggtaaaacagacaccggttcctttcgtatatctttatgcagataggtcatacaatcgtctgccagaccagatagcttatttgaaataatctcctccgatatttccgtcatgtcaagaaatacctctgattcatggctgaccttccatatctctctggcggtaatatctcgtggcatcagatttccaagctccgggtatttttcctccatgaaataccattgttttccatctttcatggcaaacaacctgccaccttcccctctggccgcctcgctgatgagcatgcgttttccaccacatttcacagttgtcggatggtactggatcatctcgctatttgccagaggaacaccaagccggaacaattctgcggtgacttctcctgtattgctcagcgaacccgttgtatttccaaacaatccgtgcataccaccggtggcaacaataaccgcatcccccggtaattccacagtctcctgactgtattcatccctgattacgcagccacaacaaatattgccacacagacgaagtgttaggaaagaatgatggctgaaccgttctaccataccagatgcttctttcctgcgaacagcgtctatcatagctgtcatgatctgcttcccggtatcgctctgtgcaaaagcagtccgtttctttttctgcccgccaaaattccgcagatccacatcatcatagccactcatgttaaatttaactccaagttttagcagccagtgcaccagctccggtgctgcctgtgtcattccccaaactgcatttggatctgccagaccacatgctgcctttattgtatctgtaaaatgttcttcgggactgtcgttttcatcttttgtattcaaagctgcgttgataccgccctccgccataacagactgtgcccgctctgacggaagggaggaaaccagttttacattgcatccattttccgctgcctgcaaagccgctgaaagtcctgccagtccagcacctataataataattgtcttactcatagatattgccacccaatataatataaaataaccgctcccgctataaaaagaagaagcaccgaaaggatcaaataaatatcgctccttcgttctttataactaatgattcccagtgatacgagcaatgggcgtatattgataaaaatatgaacaaagattaccgctacgaacaaaagctgagttaccatctttaccgttgtaaaagggaacaaaatatatgtcccattctgcacctttccaaacaagccaatatggaagaacagcagaatcagtattgccatcccactggctcgtctcgcccaaaatatggcgttctgtttcagatacatttttcctgattgcttcgctgtctgtaaactctgaactgtcaggatgacaccaatcaccgtatgcacaacaagaataccaacaccaatccatgcaagaagtttccctgcactacttccaactccgttcagcataaagctgcccatgattccatgaatcataaaaatgaaaagcattaaaacagacaaaatcgtattccattttctcataaattcccgctcacctcatttcttcgctgtccatgatcatatagtccatctgtgttaacgttgtaacgtcaataaaatcatccgatgccaggaatacatcatactttccacttaccactcttgatagcatcattgtgttactgtactctttcagatctacggaaaaaccggcctgtttcaacctgtcacagagtttctcagcataactgacaagcggataatccgtctcagatacatataaccgaaaactaatgtccgttttcatgagatctgtttcatttgtttccgaatcgtccagtgccaattcttttaatttattccgggtgttctcgttgtcgagaccatctgacatcatattaataccgagaacataagagccttccaactgtgcggaggcttgagccgccttttttgacttcggtgttgctcctgtgactgcatcaatcatagaaggcggtgaatgtaaaatgacaccaaaacctacaagaaaaacaatcgtaacaactaacagaatcagttttcgtttcacatttccacctcatttcctattttttcaaaattctcattgcgttcaaaacagcaattatggtaacgcctacatcaccaaatacagcttcccacattcctgcaataccaagagcgccaagaatcaggaacacactcttaatcccaagagcaatcactatattctgcatgacaatctgttttgtcgcttttgctacttcaatcgcgtccaccagcttagacggttcatctgtcatcagaactacatctgctgcttcaatggccgcatccgaaccaagcccacccattgcaataccaacatctgcacgggcaaggacaggagcgtcattgataccatcaccaacaaaagccaatttgcttcccggtctctttttactgtctaaaagctcaaccttttccactttttggtcaggaagcagctgtgcataatatttatccaactgcaattcttctgcaacagacttcccaattttttcatcatcaccggtaagcatgactgttttttccacgccgatatgtttcaggtcagaaattgcttttttactgtccggcttcacttcatctgttatcaaaatacatcctgcatattgaccatctacagccaaataaacttttgtacctgctttttcacaggttgtgtactctatacattctgtatccataagtttcgtattgccagcaaaaactttcttttcccctgccattacactgattccatatcctgaaatttccttataatcagaaatcactgactgatcaatttctttttcataagcagcaagaatggattttgcaataggatggttagaaaaactctctgcctctgccgcatactccagaacctgttcttttgaaaatccatttgcaggtaaaatatccgtcacattgaaaacaccttttgtaagtgttccggttttatcgaacacaataacgctgacattattaagtgcctctaaataattgcttccttttacaagaacacctcgtttagatgctgcaccaatgccgccgaagaaagtcagcgggattgaaataaccaatgcacatggacaagataccacaaggaaaacaaatcctctgcgaatccactctgtccagcctccgccaagaatgatcggtggcagaatcgccagaaaagctgctaagattacaaccacaggtgtataataacgtgcaaatgtagtaataaaattttctgttggtgcttttcggcttgacgcattttccacaagatcaataatctttgaagccgtagattcaccaaatgcttttgttgtcttaatcattaagacacccgtctgattcatacaaccggaaagtgcttcgtctcctttatgaacgcttctcggaactgattctcctgttaaggcccttgtatccagcatagaatctccatccaataccacaccgtctaatgggattttttcaccaggctttacaataataatctcaccaatggagacattttctggagatatggtaatcaattccccatttcttcttactgtagcagaatctggacgtatatccattaagtctgatatagattttctggaacgcttaacagccaatgactgaaaaaattcacctacctgatagaatagcataacagcaactgcttctggatattcaccaatgacaaaagccccaatcgtagaaacactcatcaaaaaatgttcatcaaatacacgcccctttgaaatgttcctcacagcctgccatacaacatctccaccaagaataacataagaaacaatgagaaaagctaactcgataggcagtggcactttcgcaaaaacagtcaatgccataccaatggcatagattgctgcaccagtcgctaaacgaactgtcaacttcttatcctcattgttataggattcattggcctcctgctttttttccggtatataagattcctgtacaatttcagaaacttccacatctggctcatggctatgaacaatcgtttcaatctgactggctatcgtatctgcggctgtctgagtaacattgattgtaagcgtctgcttcatcagatttaccactgaggattgcactccatccaactctccgacttctttttcaatttttgcggaacaatttggacagtccaacccttttaatagaaatatgcgtttcatgataatctccttataatttgtttaattgttcaattactcaactataatgttaaaaaatattatttctgccaaagatgctcaaatcccttgtcaataatctctttcacatgatcatctgccagcgagtagtaaactatctgtgcttctttacggaattttaccagattcgcaaggcgtaatgcctttaactgatgcgaaattgcagattttgttacccccagtagcactgcaagatcacatacacacatctcactctgttctagagcgtgtaagatttgtactctagttccatctccaaatagcttaaacaaagaagccaactggatataatcatcttttggctgcatcttggatttcacatcattcacaatatcctcatgaattacatcgcaattacaaatataagacgtttttggcatatattcacctccaaataataatagttgaacaattactcaactattattatacttatttttaaattcatgtcaataagctgatggtagttccccataaattttacaattaaaaccagctctttattcttttcttaatcttttttcccagtataccgttttggctttcttgtcacacttcctgtaaattccaaatttgtaacgctgagtttatatgtaattgtcatggtttccatattttttagaacacataccatttcattcgttaattccggcaagcgttttaaacacggaagtttccttttggcatttacatatacatgtcttgcgtcaaaatagaactgattatttgtaagaatagatttttttgcattcttataaaaatccttggtcgaaagtcttgtctccactcctgttaaatgtagaaagtgatctattggaaaagaaacttcaaaatattcctctccacaaacatacagaaatgttttacctgccaaattttggaaatatacgatttccgcctctgtaataccttgtcgtattgcgtttttcttatctacctttgttgccacttatacctcacatgcaaaaaaggggctgtcgctttaacgaatgaattttcgtgaagcggcagcttcctttttgctgttctaaggataaaatccatcaaaaaacgcttttcattgttacaggctattattaaagacgcactttaataagccattcttgatggcttgaaaaattgttttgataagtcaaaatttaggcactttttatcggaaataaatgtgttccggttcttccattttgaatcttattatgcagtttgtttatgtttcttgccatggcaagcaacgtactttctgcaagaacatttgcatttcctttgctcaaatatctgcggaactgcatatcctgttttaaatcgccaaaggagccttccgcctgtatgcttcggtttgtcctgaagaggatcccttcttctgagagtatccggtctaaatcttcttttctatgttttagaaatgttttcgcaacctgaagtgtctttgtccgttcttccaagggtgttttgcagttattccctttgatgcattcgcttttgtaagggcatccattacagtcctcacatttataaatcgttttttcacttacatatcctgttttgctttttgagtggcggatatgatctacacctaattttttaccatttttgcaggtatagatatctttttttacatcatactccatattttctatcttaccgatatcagttttatatttacgggtcttggaaatctcatagttcgcaggttttatataagaaagctgaccatttgcttctagaaacagatagttttcttcactttcatatccggcatctgctgttatgtttttatatttgaatttcaaatgctcctgtgcatctttcaaaaatggtatcagcgttgtggtatcagtaggctggggacctatggtaagccatgtgatgtattcagaatccacgccatgctgaagattataagcaggctttaactgtccgtttcccatggcatcctccttcattcgcataaaagtagcatcatgatctgtctttgaataactgttgcgttccgcacagatatgtatctgctggttatattttttgagccggttcaaataactttcaagagtttcaatactcttttgcagtgaagtttttcttttcccgatcccatgcacaaacactatattttcagtttcttttaatgcatacagttttttgcggagcttctttacatgccttatttttatcgtatttccataaacgatttttatatcataaagcaactcacactcagccacaaaatcagcaagtttctgcaaaagttttgcctggttttttgttactgccttcttccagacgaaagtatacttattggcactggcttcaatttttgtaccatcaataaaaatggtctctccggaaatttctcccatatcaaacaatgcattagacatttctgcaaggatacgtttagaacagggagcaaaatggatacttctaaaccttgcaaatgttgcatgatcaggagccggggaaccttctagaagaaacataaaattgatatctcttttacaatttagttccatggaacgagaggagtaatccccgttcatgtaagaatagagcacgatcttcaaaagtgttctgggcgatacagaatttattctttcataagtagaatataggtcagtcaaatccatagcctccacaaactgacttagtaatcgaacagaatcattatccggaatgattgtttcaagatttaacggaagtttaagttgatatccgtctgaattttttgtataatctttttgtaataatttagttagtagcataacttgattttacaccaactgccggattctttcgaggtctggcagttatttttttgcacaagaaaaggagctgcgcactaattagtgcgacagccccttctgagaattacttttgtaaaagagttttctgctggttgtcagcctcggtacccagttaagatacccataacgacgtgaaaatcattaagtcccccacgtggactacagctttatccaagctaccaggctcgatgcccagttaagacatctaatgagatggaagtttaccctgctccatctgcagcccaacttttaatgatgctcttacatcgagaacatttctgttcttgattttattatactcaatcataaaaaaaatcaacacagattagcaaattttattatattattccgatccggtcttccaaaggtataaataaggtgtaaattattggttaattcccaagaaatccaataaaatcaaggctttcacggcatccattaaacattgccatggcatacgaaaagtactttaatcatagttttgtttctccttgttttgccccggaatgccctgttttgcgagggttcccggggttattgtgatatgctctgaatttacagattgtggcaaatcagggcagaattgagcaagttgttactacctgttagtagtaaaattggtagtaaaaggaaaaagcttactactaaaggttttgttttttattcctatataatcgtaccaaaaacaaaatattagtcgcagccaaatgcaatgcataatctgtgtattcatctggtatagtaataatctgatttccttgtccatgtccagctactttatttcttacaacaggtaatcctgtttccaatgttgttcttatacttgtcaaatgcgcattcatatagcttggataaaagccattgttctctaaaattgtaataagtttctgcgcagtatccttgtttttatcatatgcatatccttgtttatcacaaatgattttcattgtgctttcaaacgctttccctgcctctaatattgcatttttattatcaccttttcgtcttctttcataagcatttctgatttcatcttcagcaccttcgaagccttcttcaaacaataattttaaagctggtttcacagctgttttatgcaaaaaagtactatcaatagtaataatctgtgaattggcaaactcataccccaaattatgctgtttaaatcgataattcaactcagcaatcgcagcatttattgccccatctgcatcataatcatattggtattttggttttatagtgcgtatctttttattaatcaagtaaaagaaataatctattgcatccaaaaagtcaatatcatcacaatctttaaaatatttttctatactggattttccataatcattttgcagtttaccatatcccatgcctttcaatcccttttctctgcaaaatttttcctcgaaaatatcccacaaattttcattatatgttgaatatggctctaaaacatcttctaaaatataaaaaacctgatttctaaaagcttgtggaaaactattatatgtaaacacttccggttctccgtctgcattcttaattctctttgataataactcgtacataccttctcctttataatctattttttattacatcctcacgtttcattaccgttaatatattttctccctgtttcacagattgcaaatcatcatgcaaagacttatgtgccaatatgtttaattcatcaaacggagctacttgacatccatccaaataatttgcagtcctcaaatttgccttagccataacatccatatttttattaagttctctcaaatctatattaaaatctccatatattttctcgtcatacgaaggtgaaaaaattaccgttctttctatatgcacttgctccccgtaacacctttcttatatcgaatatcaatatttattataggaaaagcacttgaacaaattgttgcaccccaaaaagcaattcgcccttgtgttgattcatttggatatagctcaatttagctcaatttctttaccaaatagagcgtctaactctaattcgtttctatcaccattattctcaattctttttatttctattaatacatcctttgcagcacttctaccagtattagtaactcttaacattaaatgaccacatttacatcgaaaacaaattagcaaaaggaacatcttttaaagacattgctgcttctctatgtaaagatccaacgaccatatccaaagaggtccgtgctcaccgaatttcagattggtatcacaaaggcacattctataattcaaagaacttttgcattcatcgttaccactgcaagaagaccaatgctttctcgcctaatagtttcgcaattcttgcagatacaatatctgcctccttagtatcgttctcaacttccgtacgatcagtgcgttgttcgtaatagctctgaatacgtttctgcgcttcatcaatactgctttttccttcgatatgttccttggcagtatctaacagatacgcagaggtcttcaaaccatctaccgcctgcaagccaattgcagtctgccacgcttcactcttttcaatttgaccaggctcaccttgtttgatatattcttttcaagttcaaattgccagttcttttctgctgacatagctgcacctcgcttcttgcttaatatgcaatcctaaaataagccaaatatgctttatacttgtcctgtgcggtcaggcaagtatctgtcaaatagcctttttcgttgtcccattccttcaatccacggtagtagaacatcttcagattgtcctcaatgatgaacggaacaatattgtatttcaggcactccttaaacatgatcaatctgcccacacgcccgttgccgtcctggaacggatggatccgctcaaacttcacatggaagtccagaatatcctcaaaagtcttttcttccttagcgctatattccgtcagcaagactttcattttatcggcaacttcttccggaagggctgtatccctgccgccgacttcattcggaagtttcttataatctccaacagcaaaccattcttttctggaatcgctggtgccgttcttcaaaaccaagtgaagttctttgatgaatttctccgtcagagctgcttttgcatgatcaataatcatgtcaatgcagcggaagtgatttgctgtttcgatcacgtcatccacattcagcacttctttttctacgccgatggtgttggtttcaaagatatatctggtttgatcgtgcgtcaggcggcttccttccatatggttggaattgtatgtcaattcgatctgtgttttatggtagatcccaccagaatatttacttgccttctgctctttcagaatatccaacagagtaattggttctgtttttcttttattggtacgctccggtttttctgcgttttccggaatattccatgtcttgccggtaagaaacgcaccgttcacacgcccctgggcgcagtaatttctaacactgcgctcggatatatcccactttttcgctatttcagtaactgaaagatatcgcatctatgatcctccaccataaaatttatcaaaaaactacgttaatttattacatagtataccatatcatcggcaaaaatatcaacattttccgagtttggctgctacatttttgccgtcacaggatacttaggttttcgatattccataaaatacactgatttacgtaaaagcatgattaggattgcgtcaactaatgctttgcgtgtacacctataagaaaaaggtctctcaataccatgcgtacttggtattgagagaccttttttcttaatcactgatgcattcggtacagttagctatagttgctacatccttcatttttaagccagacttccccaatatattatttatattctttgcaaattggcctgcactccactcaccattgacatataccaaaattagcttggttttagctcttgtggctgcaacataatggttataaacatcttcttcacttgacagtctatagtcagacacaaataaaactacttgttcaaattccagtcctttcgaagagcgaaaggtaatcgcaatgatatattattttcttgagtaaaataactttcatcaactgcattcctgctcttaagaaattctgccgttctccatttcataagctacatctgtcacattcattgtggacactctgtggtatatcaggccaaccgtttttttcttggccgattctttcaatgattttaagataattccctcatttaacagatgttaattccattatacgggatatgatgtctatcattttggaaggtgcccttgatcaggaactggatgaagaactgggatattccaagtatgattatcgaaataaagaaaccgataattccaggaatggatattcccagaaaacgttacataccagttacggaaatatggagattgatattccaagggatcgaaaaggtgacttcgaaccacaggttgtaaagaagtatcagaattcgattacgcaggacatggaagaaaagatcatttccatatacgcaaaaggaatgactactgccgatatagaaagccacatgcgtgaattatacgatcttgagatctccgacagtactgtcagccggatcactgataagatcctgccaatagtaaaagaatggcaggaaaggccattagaaagtgtgtatgctgttgtatttatggatgcgatccatttccatgcccgtaatgaggggcggattgtaaaacgtgctgtttacattgcgattgggatcgatatggaaggacgtaagtatgtcctcggaatgtatgttggtcaaaatgaaagtgccaagttctggctctccatcctgaatggcctgaaaaaccggggtgtagaagatatattgattgcgtgtgtggatggactgaccggttttccacaggcaattgaagcagtatttccccagaccgagatccagcagtgcatcatccatcagatcaggaataccacgaaatttgttttttacaaagagatcaaaccacttatggcagatctgaagcgtgtatatgcagctcctacagaagaagttgcattggcagaactggacagctttgacgaaaaatggagcggaaaataccctaagattgcaaagtcatggaaagataactgggcaaatctttcaacgtattttaagtatccggaagctgtcagacgtctgatctataccacgaacacgatggaaggatttaaccgccagctccagaaagtcaccaaatccaagacggtatttccatccgatgacagtctcttgaaaatgctgtatctggccatgatagatatcaccaagaaatggacgggacaccgtaaggattggggacagatccattctcagctggaaattttcttcgaagaaaatttgggcgggatatttttatttatatttcaacaaatcatacatccttattaaacgctttaattcagaattaccatttaatacttttggagtatgctttttcctaaaatctaaatattgatctgttgtaaaaactttattgttataatccttttccaataaatatgcaatagctggctgctgtccataatagtccttttcgtcaaccatatttgcatacacatcatattgaaattcattactgctaaattcagtacaaaactttcttaataattcgtcccatttttcagatcctaagtagcgtttacttaatcctgaaccaacaaataaaaatggatgatgccccgttgtttgaatggcctcttttataattgttttaattttactatccaataaaatctgcttccgtgcacttactaaactgcatattgtttcttgatatataattatactataatatctcaacaatatcgtttcattagattatccgtacaacattgtaataatgatagcattttaataaaagaaacacaatgtattaccgtaatagtattaagaatttttcttctatatttgatttttatctaatcttcctttctccagatactctgccagctcttcccggctccgtgtaatatattcatacgtcacatacagcggatcgatccgttctaccagcccctttaccccggcagccgtaaacggttcgtggcggtcgagctgaaagatatgctcatagaccacccggaagctctcttccggatcttcaggcagttcgtgtggagcatctgccagccattgtttcacatactccccggtcagggattcctgcaggtgaatgcctttgatgtaagggatcaggtctttgtgattgtcaagcatctgatgcaggcaggccacggccgcatcctgatcgtgaagatccagatttgtatgcaggtagtgtccggtatccagcataaagcctttcttttcgtaatgtacctgtttaagcagtgcccgggcatcttccgggttctcgaaggtcagacccggccaccacaggttttccatgagaaaccagaaatgataggtctgcccgtccagaagttcattaatgaaagatgcagcggcatcgatcacttctcggttcgtgtgtttcatctgataggtgaaactttcttccccgtctacctgtaccacatgaaagacaacatattccgcacccatacgcgttgcatagtccagatctttccggtagtgagtgatcagttcctctttgttctgattcatccagtcctgaaggcagcaacagtgaacgccggttaccatgtccggttgtatcagtggacacacactggcctcctgataaacatccggcgcttctttggtagaataggccaggggcattacttccagcccgtcacagccatgttccttataaaaccgccgtaaatcctctgctgatgtaaaacgggtcacgtcgtcaaacgatgttgtaaaattcatctgatacttcattccggcttctcccctttttccatatacattctctttcttattcgatgtactccacggtaaatcctgactcctggcagtacgcagccactttggatccccggtagcagcgaatccttgcagccttgttgatgatccattcaccgatgtattccggatcatgccggatctccagtacctgcagacgggcacatccatggaatacccatttttcaatccgccggatgctttccggaagctttacttcagtcaggtacatacacttgaaaaatgctttttcatccagcatctctaccgtatccggaagttccaggctttccaggccacagaagtaaaatgcttcttttcccacctttttcagtccttttgcgaaacgaactttctttaattccttgcacttataaaatgcccggtcttcgatggtttctacctttggtggcagcaggatggtattcaacgtagcacattcataaaatgccttttttcttatcctttttatttcactgtctctggtaaaaagaaccttttgcagccgccggtcttcccggaacagatcctctgaaatttcttccagacctttcgacagatacgcgacacgaagggaagggcactcggcaaaacagccgttccccacccggtagatactgtgtggcaatgctacttcccggagcgccttgctgcaccggaacgcgttcgtgctgatctcctgcagcccatttggcagtaacagggtcttcatttttatattggactggaaagcattgacaccgatcatctgataatacgccgggatcttaacggtttcctctttcccgtatctcgccgcatttctctgtgtcagtaccatccggtcatcatttttattttcatagttacacataaagtagttgtatcctccgcaatccatactggaaccctacggctccagtatcccatattttttccggatgcgttccagtttcgcaagcatcggttctcccagcaccgcgagaaagatcaccgtggcactcccgtggatcacattcatcgggaaaccgcttgcatacatcgctaaaaacgcagccttattgattccgcccattcccataaagacggatgccgtatccagcaaaaatccatagatgaccagcaccgacagtcccccgtagatgcaaagccacagatgaaaatgtttccatttgccccgttttctccgaaagatcaggccgcccaggaatcccacgatcccgaaagcaaacatctgccagggtgtccacggtccctgcccgaagaaaaagttggagacaaatcctgccagcgcaccggttaaaaatcctgcttccgcgccaagcccgacccctgcgataatgacgatcgccgcggtcggtttgaactggggcagcataaagaacgcagcccttcctgccaccgcaagggcagccatcaccgcgatcactaccacttcccgcgcctgtggcctccggttttcgaaaaccaggaaaaacggcagcatcgacagaatgatgatgcacatggagataaaataatcgctccggtcattcagaaagaagatcccgaaaaagatcaccgccgggattgctgtcaggatcaggacaaaggcaaggatcgtccgcttcccgatccccgtatctttcgtctcgattctggtctggtaatattccgctgcatactccttccgggtatccagaagtttccccagaaacgggacgatcagaagcgccagcacgatctgcaggtaggccgctgcggtcagctgcacatggctgtagatcgtcaggttcataaaattgttctcacgcccctccaaaaggttcagtgccatattggtatcggtcgcccaccacaggacagccgccgtcattcccgtgttccataaaaatgcgaatcgccccagccgtttcgctttcaccttgacccggaacgcctgcaggatgaaacacaagccaaggatcacactcaccgccatcccgatccgcagatacccggcggcctggtctgccgcccgggtcatcgcctccggcacctggtagttccaggcgatcccttttgctgtctcttccagcttccacagcatccctgcctgtgcataggggctgtaacgaagatccggtacggatacccagcggaatccgagcattgcaatcagttctgccaccatcgcaagcaccggcagcatcgcctgggtatccatccctctcgcctggctgctgtcaccggcttccagccgttttattctctgcatcgttcgatcacatcctttgctgtcaccgcatccggataccatttgcgtgccatccggttggcggccgtagtataaaaactgtttcctgcaaaaaattcccgcgccggtgcactcgtcaccacacttccgtggaagaataatgcacaggtatccccgtattctgcgcagaattcgatatcgtgggaaaccatcaggatcgtcttcccttccgccgtcagccctttcaggatctgtgccagtttcttcttataaaatccatccagcccctttgtcggttcatccaaaaggatgatctccgggtcaagcaacagcactttcgccagggcggcccgctgctgttccccgccggataagtcatacgggtgacttcccagcagatgcctgatctctgtcttttcgatgacatcccgcaggcgttcggtatccccggacatctcccgcaggtctttttcgaccgtatccttgacaaacagactctgtggattctgcgggaggataccgagaagttttccataaagttcgctctcccggtaggttcctagttcctttccgtttagaaaaagtttgccgcggtagggcttcttgatccgtcccaggaggcgcaaggtcgtactctttccggttccgttgccgccgagcagacagtacagttcgcctttttgtactttcaggttcaggtcgcgcaccacatccgggagttccttttcataccggaaccatacgtcccgggcttccaggacagtctgtggctgctgatcatcagatctctttgctgatttttttgaaaataatccgaagagtgaggtttttctgcccttcactagggtatcgaccgtttccgattcctgtgtatccgacagtttttcagctaattctctatccctgtcatctgacattttttcaactgtttctgcctgattcttgcaactgttttcggaagttttcttttcctctctccactcttccagccactctctcccttccctgaccgtcaccggactatcgccctctccggaaagttcctcaaagatccgcatcggcacaggcatcgcctggaacatatcattgtcccggatcagcgacggcagtttttccggtgcatccagtgccaggatcccgccgttttccatcaccagcacccggtcggcgtacgccaggacttcctctaaccggtgttcgatcaaaaggatcgtcgttcccagttctgcattgatctttcgcagggttgccaggaaatcccccgccgccaagggatcgagctgtgatgtcggctcgtctaacaccagaagatccggctgcatcgccatcaccgctgccaggttcaggagctgcttttgtccgccggaaagctcctccacatttttctcaaaccaggtctggatcccgaaaaaacttgccatctctgccacccggagccggatcgtccccgtctcatacccgaggttttccagcccaaatgccaattcgtgccatactttatctgtcaccagctggttgtccggactctggagcacatagccgatccgcgccccctgctcccgcaccgacaccgcgtccagctccctgccttcaaacagtatctgtcctttccgttccccgtaaggtgccatcgctgtcttaaaatgccgcaggagcgtcgatttgccgcagcctgatttgccacaaactaccagaaactccccctgtttcagggaaaagttcagatccgtgagtgccggcttctcctgatccgggtaggtaaatgtcagatttctgatctcaaagagcgccattttctgtcctccgctatatttaatatcaggggcagcatacataagatcccatacaggatatataagatcaatgcccccgctgttgtctcattcatgataaaaaccgggaaatacaggatcttcagttttcgaaggtgcatacagaataacaatgttccaaatactcccaataaaaatgccagtaacatcccgtccctccggtcaaaccggtagatactgaaattcgtcctcccgcgaagcccgtaagcccgggatttcatcgaatccgccgtctccacactgttttccagtgcccaggttgtcgtgatcgagaggattttcaagccatgtgccgcccgctggaagatattcccgttatttacatttcttccgatacactgctgtgcttccgccacccgccggatttgctccgtaaaccgtggcacaaatcgcagggtcatcgataacagcagcgaaaacgccgggatcaccttcccgaacaggtacatgaacttgtccgaagtcatcacctcatggaagacggaaaaccatgagatcacccccgccagcatcagccccgaagccagaccgtagacgatcgactccagtgtgacgggatttccgtcttttaagtaaaagagcatcgttgcccccgcatggctgaacagcgggttggcagctgctgccaaaagacagaccggcagcatccccagcaggaacaccttcacggtttttctccctttcagataaatggaataactcaccgagccgatcagtgataacgccagaaataccggatgcatataaaacatcgacagcccgatgacgatcacaaaataagtaaaattaatcagtggatgataccctgaaaaagtatccattcttttctccttgtccatacgtttacactttacgcatccgtctggtaacattccatgtatacttctattccttttcacggtatacgtaaaatacagttttaggcgtcccggaatccggggcgcctaatcctttccatcttcagttaagacatgcctgctcccaggtctcttcccaggtcacaggtataatgccattcgatgttgtccccgtcctgtacctggtaacggctgcatccatagtttggataccagccattcacctcatacatccagccggaccactgcccgcagtccttctcatacaggttgttgatgccctgcacataagcactgttgtacatggcggtaaactcggattccatctggattcggttgttcttcatctcccgctgcaggatgtcatatactgactctccttcggaaaatgtcacggtcttcggaccgtagatcacaccgtttgacggaacccagccttccttgccttcggtaaggtcgcccatgttgttgagaatcgtggaacactccacatacagggtacaggtcagctgtttgctgctgtccacggtctgatcctgcggttccaccggatccggttttccctccgggatcggatcggtataatagttatccgcactggcttcctcaccggaagaagtgcttccattcccgttcgttccgttgctctctgtaccgtctgcatcttctgtgtctgagtttttggagtctgagtttttggagtcggatttcttagaagaagaactctttttcttatatttactcagatcttctttttcctcatccgatccataatgctcatctacatactcttcatcaatgtactcaggttccttgtcactgttgtcttctttgacttctgacgaatctttggtgtttccatcctctgctgaatctttcgcagccgcggtcactgtcggatctgccgaagcctgttcttcctttactgcgctggtctggcagctgcaaaacagcagcgccagaaccagcagaaggcagagtcctatgcttttcgttttccgtttcattttcctccgtccttcctgcctttctctttggaaagatccagttttccctttcctttccgtttgttatatacaaccactccaatagccgcacagcataccagggcgatcagtccgatcagcccccagcgtaccatagcggtctttttctccgctgtcgttgcaccggtatccgtatcgtccccgtttccaaggactaccgtttcttccgatgcatcccacggcacatcttcagccgcatccgatgcgtcctggatctcctgtttttctgcatccgtactctcatccagggaagaagcaagggcacgttttgcgatgaaataatggccgccttctttcagggtgaactccatcttgccgtcttttacagataccttcttgacatattccgctttccggttctctgtgtcatacgaaaacagcaacaaatcatcgtcgtcaagttcagtcttcagtgtcacaagcatctgtcccgggaacgtgccggatccttcggtacacagaatcagtggtttgactgccagctgatcgatatcatccttgtacttgcagtccgactgcagcttgtacgtccaatcctttgtcagtttcacatcttcaccgttgatcgtcagggtatacgatacggaatcggagatcttgccactcgcctgcaggttttcatcttttcctttgatacttttcagttctttggaagtaatctttcccttcgtctttgcctttgtggtgtcagaagtagtattgctactcttattgctgctttttgtacctgaacttctctttccacttgcagaagatacttttcccctgctctggattgatgcaattgacatgcctccggtgcggctgcttttaccgctgcttttcgaagaagtgatggagccgacttttgtggtcttatcatccgaggaagtatcctcccccatcttcggggcactgcttgccagccagtagcgtcctccggttgtcacattcattttgagcttaccggaagaaacggttgccgtcttcgcactctggatcgtcagcttgtccgggttcagccagtacaggttccagcttccgtccttcacactggtctttacggacagtgtgaccgtaccgttcatgcttccgctctgggagaattccacctgcgcctgtgtgccgtttatggtgttgcttccggtaccgatcttgataccggctttcacatcactggctttctttacagtttttccatcccaggtcagcgtgtaagtgctgccgccggacagagtacccgtataggtaaatgcttcttttgtcgccatcaggttttcgaataccttcttcggtacgattccgttatccagtgcttcgatcacatcagcggcttccagaaggctttccccgttctgcaacagtttcttctcatcctcgcggagtgcaccataccggctcatcagtttcttgagcgtggcggtatcatcctgacagatccgcagtggatccacctggttccagatatccttatccagggcatccaccagcttctgccgtgcggcgatgtcaccgaggtaaccgttcagggttttggaaagggattcttttttgtcccactctccaagagtatccagttccagcaggtactggtttaccaggtctttgtcaccgatctttaccggtgtggcgatggcagccactttcttttccagtgcgctgcgcttctcttcgagtttcttttcttcttctttttccagctctgccagtttctttaccagttcctccagcttgtctgcattcgttacctggctcttttctttatctgtcagcttgtcatacgcttccttcacggaagttacggtatcggcctcttccagtgtcagtttgtctgcatccggtagtttgtcgatccggttgatgatcgctttcgtctccgcatcggcagtggtatgcaccgtcagtttccggttttctgtttttccatcccgtttggttacagcaatatccagttctgttccgtctgtgactgtgatttcaccatctaccggtgtacgaccatctgatccgcggagcccgcttttgtaagtctttccattcaccgtcacaactgccacgtcataattgccgattggaaggttggtaaaggtcagtttcttgacatctgctcccacatacagatccgtgtccgtaccggcatctgcggtaaatacactgccattgtctgcctgtgccatatactgagtggtgttggcattggcacggaaatcaaaaagattgatgccctgctgatacaggcggtaagctgcgattgcctccattgcctggtcagttgccatgctgtttggacggttctggttcttatcgtcataataggcatgtaggaaaccgccggttccggtactgtaatattttaacagaccatctaacaggctttttccgctggatgcattggtcactgtcgccgggtcgatccccattgaggtaaaagcgatgattgcctgcgccaccgattcgcagttgtaggtgccaccgtagttataatccccgtctgtggagatcttactgcgcagcacatccagtccacgattgacggcttcctttaccttcgcgtcctccgcagcatggggagccagcgcatacacgaccatcgacgtgatatccaggtctaacgacggcttatcatccagagaccagccgccaccggataattcttttccaaggatgtaactgatcagggcttccctcgtatattttgccccttccggtacttcatatcctttggaatccagggcaagcagcgcccatgcggcaccgttcattccctggttccatggagcacctgccaggcagttgtacgttccgtctgcaatcaggtcatgtcctcccacatccgtcggatccccgcctgctgccagtacggccatggtcagacggtgccattcggtcggcgtattggtgctgagtcctgtggatgggttcgcatcatatttttcttttacatacgtatttgcacggtttaagaatgcactgtaatcttccccgattcccagccgtccaaagaatactacggtccagtcagacgctgtactgctgacatttttcagaaaatccgcggtaaagaccgtattattcgttccctgtttccagctgaccgtctgggagatcacggtgtccaggtcataggaagctgctgcctgcacctgtccgttctcatccacatcctgatctgccgtaccatacagtttcagttcttcgtcttcctcccaggaatccccggaggcttctgttttttcttctgctgtctccggaacggatgttttttcatctttccccgtaccgacaacttctgcttcttccggaacttctgcttgttccggaacttccgctgcctgtggagtatccgttttggcagtgtcttcatttccggtaaccaccggttcttctgtcggatcagcagtgccctccacggcctctgttgctgccgcttccgctacttttgctgaaaactcctcagaaacagtctgagcccggactgtagccgggcaaagactgagaaccatggtagccgccagaaaaagactgatggctttatttttcattactcttcctccgtctgtactcctgtgattctttttttctttttataatagagaacaactcctgcaagtacacctgtcgctgtgatcagtccggcgatcgggaagaggatatcggtatcatctccagtcttcgcacttgtgacttttccagttccggataccgcagtggttccgtttccagttcctgtgcttccaccacccaggttgccattggtaaccgttccggcagaaccaccattattgctgcttccgtttcctctgcttactgtggatgcaggtacaaccacaccgaaggatccggtactatttgctgttacgcttaagataccattgcttacggttccgctcagggtttcgatcttgccgttaccttcgtgcagtacacttaaggtctgtccgttataggaggttcccacctggaagttcacggtaagtttgtcgttccattccacttctttaccgtctttgtacagtgctacatcgtacaggcggatcagtgcttctttggaactgatcatgttctgcatctgttttaccacatcatcgtctgctttcagggcggtcaggcgcagttcataaccggagagttttccggttacagagatcggatagttctggtaggtcagtgttatgctgtcctcgtcctcatcctgcttcggttcatccgatggggatggatccggggtcggggtcggattcggggttacctcttccagacgtttgatctctgcctcacgctcttccagtgcttttagagtgtcctcagatacatattgtttctgctctttgcttaagttgtcatacgcatatcttgctgcttccacagcggtcttatcggacaaccgcagatctttgacagccgggaggctgttgatccggtcggttaccttcttcgctgcttctgcatctctctgaagccagctcatctggttttctgcaatcagcagttcactcagaagtccgctgtctgtcagctgctgtttctggtcgttattcagggcgtcgtaagcgtcacgggcttcctgtatctggtcggcatccgctgccgtcaggtcatcgacggccgggatggcctcgatcagttctgccacatggtctacttctttctgtaacgcatccagacggtcttccgctgctgtcagtttcgcaagtgcttcgacagatacccggtccttcaggccttctttgatatcctccagtgcttcataagcgttacgcgcttctgtaaccgctgtctggtctgcaaacaggatatcttcggctgccggcagtgcattcagttttgcatttacttcatctactgccgcctgctccgctgcttcctgtttcagttcgttcagccggtcaatcacatctttcagtttggtaagactctctgaagatttctcttccagatcgttcttctgatcctcgcttaacgcattgtaatgtgccagtgcgtttgcgatcgcagtttcattttccagggttacattttctgcagctggaagtgcttcgatctctttgatcagttcatcaaccgctgccgcatccagaagttttgcgatctgttcctctgccagtaccagtgttccaattgtttctgctgtcacatagtctttctggtcgtcggtcagatttccgtatgcggttcttgctgccacaacgtcttcctgatggtcttccagtgtcaaatctttcacagccggaagtgccttgatcagatctgtcactttagcggctgctgccttgtcatctgcttcttttttcagttttgcgagttctgtttctgcagcggccagggtatcgtaatttgttacatatcctttttcctcgcggctcagttcctcgtaagcttcccttgctgctgtgatcttcgcttcacactcatctgtcagttcgatcgttttatcgatctggttgatcttatctgtaacttcagctgctttttcccgtgcacctggagtctcatctgctgcttccagccacttgttccatgtagatgcattaccagtacttccatagcttccatcgtcattcttcatatcagactgttcaaccttatagtcatcgatataatgccagatgatctcatcgccattgcttacataccagctgtttaggtccatacttgggtgaacaccgttgacggtatacatccagccagagttctgaccattgtctttttctctcagttcatagccaccacaggatttcggtgcagtaattgcactgatgtagttcttctccagtccttcataagaaagtccagcttcatcaagtgctttcttaaatacatcgccgacagttacttcatcaccttcaaatgtataagtatctgttgcaatccatgttgtgtaggaatgttttgtttcgtctgccgtatcatctccgtgtttggtatcaccaatcaatcggaaagataccactgttttaccaggctctgccgatggatcatccactttatgaacagtaattgtactcataactgccgtaagcagattttgaccgtcttcattcttcaatacagctgtcaggtaatgtgttcccagtgtcagcgtattggtattgattatagcttgtccaaattcatctgttgttccgatgcatttatttccatcgtaaatcttagcatccgcaacagtactgtatcctttcttttcatcagacggatcttttccaagtaccatcagtgtaatctctgtaccacgatccacatccttattctctggggtcatccatgcatgcagcattccctgtaaatcggcattgtaataaaactctactttatcgccaccatttaccaatgtatttgcaggatctttacataccacaccattaatttcacagatccatcctgcatttgaacctttggttcctgatgctgatgtatcatcaatagtcagttttcccttcgaacatttgaaagaaattccattctcatcgcatgcatccagtaatgcatgaagagctgtatagcctccgtagttgtatttcacataccgatgtgcttttaagtcttcgatctctttcggaatctccacatctgcagtcggacgcaatacagcattctgacctgctatccgcacgcttacatttccactctgttccggcactgcctcaagatcttccactgtgatgatctgactttcagaatcatctgtgactgtgaaactgccactcgtggtcagatatccatctttggaaacatgccaggtgtaggttccattttcgcacttatagcttccgtcttcctgcggtttctgaacagcatcctttccgttggtcacgagaacggttgcatcttccggtactttgaatgtaattgttctggcttgtggacgacgggttactgtcaagtgataggtgtatgtaaccgtttcctttgtacctttacaagtctgagttataacaaatttattctctcctacattcaacgatattggttcaccataagcaatatcagtttcattgccatctgaatctacggattttaacgagattcctttgctttttatggttgttgcagtatactttgtcgtcgcattttggaatacattcaaatctatcttttctgtttcatatggcacagatgtaacataatctgtttgtgttcctacaaagccatacagatttgtaggtttttctccatttatctcacaatctgcatttacacattcaagtactccatcatatcgaccaaaattttcagttgtacctgtttctgtaacagtaacattgcaaatacccgttaacaatttctttgatgcggcattacgagcagcaaatatttctgttgcataaactttgggatacccagttgtcggtttcactaacacttccacccacataggattttcttgcgaaaaatcatatgttcccagtatgccacttttggtgccatttggaacttcgataaatgaatattttgtactatctccacatttccaagtacgtacatatattttcgcattcgcatcgctggcaatcgcttgtaccgttacatttcgtgatacatttggggttccactaaatcccgtatttgtttgtatttttggtttccatatagctccaagcattactttaagactacttagtgttccggttcttcttgcatcatcttctgctttatttacgccatcttcaacttcaaaggaaaaatctggcaaaatacttcttctacctggacgtaactcactaagtccacctgtataattggatttatacaaactggaacgtgtcatacctctatgtgctttccctaaagcctcttcctgacctgtataggcatcaaaggcgatatatcctgaagaaaacttatactctccgtcctcatccagatatatttctttgtccgatgttgtcgaaatttcatactgatttgccgcaaatttaacagtatccgttccatttaaagtatacatcgcattctgcgtggctggattatagatagcgcccagtttatataaggctgtgcataacccatcgatatgtaactttgctgtatctccagataccagttttttcccaggatttgttttattggaaactgtaagatccagtggttttgccgtaattacacaatattccgttccatgcgcagaacttacttctacaatatttcgacctcttttcagattaatggaaaaacttccgtcttcattagcctgatactttgtccaatattgactgtcatccagccagttagcctcatctgaaatatttaagactccattctcaatttgataaggatcatgtacacgtacagataaagtatcaccatacgaagattccggtttgaatgtatacactgcgtggtcatctttttctgttttctttcctgtttcatcagtctggctggccagccagtaaaccgtatccagatcatccaaattcacattcaggttgataccactgtccgttttccctacctgaacaatctgtgttcccgtattctccggatacatggcactatacaagaaaaagccattcgaatcctgcaaatctgccaattcagttacccattccatcgcgtcatacgtatacagcaccacgctagtaccggattgtttagcctcaatccttccatactgtccgattggatcatcatccgtcacttcaacttgcactgcgtttcccagaactgtataatgaaattcggggtcataatgtacattacttccagtattattaactgtttgccaggtacgcaagggcgccagatcataatatgttccctgatctatgttcaacgctctggacatatctgcatttgacatgacatttgcttcaaaataattggcttccccataggtatcattccggattacctgtttggagttatttttcagttcacggaatgtaaatacatcaacatcgccatccttactccaagaaccaaaatttgatttctttccctctaactcaaagctgcagaaacgggtaacttttccatcctggcgcaacatgaaagcaccttcataatcggttttataataatcataatttggatcattaacagattctttctctagtttctccagattttcataatctctcgccatgtaaaatcttgactgcgatgtatgacagatttcagttcccttcggtacttttgcaacaaattcatgctttttcatcaatctgtaataatgttgatccgaaaggtttagctgtttaaacgctccacctactgcataattgtaaaaatgtcctctttgagtcacataattctcagtatcatttggaaccaattcaaaattataatagctgtcaccgtcataacatggcagatagaaattatagctatcctcgcttgacggaataaatactcttccatcttgatgactgactttcgctgtcatctgatctctgtaattactttgtacaattccatgcatttctatacagcgcaatgtaattttcgaggtatctttttctactgaaaattctcctccgccaaagtcaattccgtctttttgagaatacaatctgtattcataggttccaacagaaagttcgtattgattatttctttccaaactagttgtatcccaggacttaacagattccaactgctctccattttcatcttttaataccaaaaaaggcagtaccgactgtccgctctgccctcttttatatgtatatctttcagttgtaataactacctgctgtgtgtcttttgatttttgttttgcaaatactggtatttggacagataacaacagcaatagtaaaaatacaagtccgaaaaaatgtttctttttcaagcgaactcctttctaccaatattcattcagggtaatttaaaattccctgaatgaatatctgcgtactttcttaaaagggtggcttattctctccacccttttattgatactttaaaccttaagctccataacttctaaaatattcaacggcatcgctctgataaccatatacccaaagaactgtatctccatcctgtaaatcaaatactgctgcagataagttcaaactttcttctacatatttaccatcacggattactccatacatccagccataatatccagcttcactataaccaccttccagcatctttgtagcattaccattgtcatcatacatagagattcctgaaatatatccataagatgcgtcaatatttgcaattgcattatcttcaatcatattatctaaagtatccgctgctgttgcataatactgagccgcacttggatctccatgaaatttgctggaagtatttccattggctgcctgaactgtcattggaccatccactgcaaaataactatttcctgtataaaaatcgtacatctcaactgaaatgtttttagctgcaatatttttagtagtatcttctactacaacataaaaatcgcaagtctgagtacctctttttgcttctactaatactacacctgaagttgcattggcagcgatatcaaccgtacatgtacttgcatatccgtgtccagagatttctgctgttcccgtggtacattttttaacttttgactcaccataagatacagtccaagttatttcttttgccgcatccgtagcattatcaaatccagtaaaactgtaacttgaattagccggtcctacataaaatgtagcttcaccgcccggatttacagaggcattccacaaatagttattgccatccggttttgacagaattgtgtcgcttgtcgcggcaaacgttgtggtactcatagccagaaccatgaccattgtaagtactagtgataccagtttcttaaacagattctttgaagttttgtttctcatacaaacttcctccttttttgtatttctacccctttagttaaagccatcacagcgtggggaatggttgccgctgtgtgacctgtaaagtttttatttgttatggcaaataaaaaagcccgtacaacagaagtcgtcatacgaactaatatctcactttcgaacaaggggtgatttttcttataccacaactgacaacagaagatagcagctcccgcccgtttactcgtccaattcgtttcggcctccgaattatcctgatgctaaagcagcttttttgcgatcgtcttctggactcaggacctcttagcctacttgatatgccttaccaaataataatactcagtggcatataacatctttcgttgtccttacagcagggtgaaactgtcccggattctaaccggcttccgttttcgcatgctctctttaacgtgtcgtataaaattttaaaatcctgtcataatatctataggattattgcacggtagtcttagattcttcttttctaagacatctttacaaccctaatattaaacattgttcacagatttgtcaatctttttcggcgttttcttaaaaatagctggttcttccgaacgattttttatgcatttttaagcatcccatacattttctgctcaccgttcgccgtcaggaaagttgtcaaaattctgtagtcaggaggctgcttatgagaactggtcaaaacatctataaacgcagggacgggcgttgggaggcgcgtgtcccgctggggaaaaaggcggatggccgtccgtattttaaatatctgtatgcgtcaacttaccgggaagtgttgcttcagaagaataattacgaaaagacgattccgttaaaaaatacacaagtcatttccaacgcattattctccgatgccgcatacaactggctgctgaattctgccagacattggaaaccatctacctatattaaatataagaactgcctggaaaaatatattcttccccagtggaaaaaactctatgtaagtgacattcggcaaggcacttatgatcggttgatggaatttctccaacaggagctttccggcggttctatccggacaatcaatacgatcatcagcgggattttgaaacacacattaaattatcttccggtcaaatgtacaggaacggtttctgatcacgcaaagcgacctttggatattctttcagacggggagtcctgcaggcttcttgcttatctggaagatagcaacgatctgatttctattggtatccggctgactttgttcagtggtattcgtctgggggaactttgtgcactgacctgggcggatattgatctggaggaacaggtgcttcatatccgacacaccttacagcgcatccagaatcagaaccctctgcctggggattccaaaacagtgttgcatatcggttcacccaaaaacaaacgggaacgatcgattcctttgcacccgcagataatcccagttcttgcaaaatataaaagcagttatctatcctcttactatctgctgtccggagcactgtctcctgtggagccgcggagaatgacgagacattttaaaaagatcttaaaaaactgtggtatccgggatctgcattttcatgcgctccgtcatacatttgcgacacgttgtgtggaatcaggtatgcagatcaaagctctcagtgagatgctgggacactctacggtcaagatcaccatggatcggtacgtgcatctgtccatgagttttaaacaaagccagatcaccatcctccagttcccggattcggaatcgaaaacccgtcaaaatttcagtcagacaaagcggaaagtgccggaaaatagggaagatatggagggattgtcttagaaaagaagattctaagatatcttttttattaatatatgcgataggagtttgtttagaaccaaaaaaacaggatatatggaaaaatttttcttttttccatatatcctgtttctgtaacccaaccatttcatcatactttaaatagaatctgacaggttaattatccttttcataatatccttcctgactatattcagaccacttcaaatacatttcctggtagttttgtttgataaacgcttgtattttcctgatttctctgtcattaaggattccccgattttgtaatactgtatcaccattatcttttacaaaaaatttcgctgatccggcttctgtaagtttacggtcgctcgcatgtacatgcatacattcaatcacacaataagatgtaaagtacaaataataaccggcaattttatattcataatactttggcatcttattcctccataaatttacggttcttctctaaatagtctcttgcgatagccacttcaatatcatccatacttgtttcaagcgcatctccctcttttgaaaataccgttgcccgatctggacgattcaaattcaagacacgatatccttctgtgcatcgtgtgaacgcatatccatttactatcatatctgctgcatcagcaacttgtttaatatcagtcatttgcaatcttcactccttttatcggtttcaaaaatttgtctgtatcaaaataaagattctgaagaatcggtacaagatcaatatattcttcttcaggttccttattttgcttatattttgccattacaaccagataaccattatcccattcttttacttccgtatagtattccagtgaatatggtgctgtaaaacgaatgatatgaccattaaactgaaagacggtataatttttttcattactaagagtcgcttcttctggcatattcttcccccttaataaattaattcctatttcatttgatatttcattatttgttgcaaggtatcaaagaatctttccagattgtctacttgtgttatctttattttatcctgattttatcgcgattacaataataatttttttcgatactcactcggtgagaccatgtatttttccttaaacacccggttaaaggttctctggctttcataaccactgtccagacagatagttgtaatcggatcgttggtattttccagccgttgctttgcatagccaagtcttgcgtcattaagatactgattgaaattccggtggaaagttttggaaaatacccttgataacacatacttgcttacgccaagatcctttgccatatcttctaacaaaaaagattttcggaaattcgcagaaatataggataccgtctgataaatgagatcattacttcctacctggcttttctctgtcagtgtaagcagcgggatacatctggcaaagataacctgcagataggcctgcacaatccagatatttttcggtacgcttcctttcatgctctggatagctggatagatctctgaagggagttccccatatttgattaccggatataccggggcttttctttttaataattcttcatatgtacccaatgtcctcgtcggtatattgatatataacacttcactatactgctctgaaaacacctgacaatggtggatcacatctggaaaaacaagaccaatatctccttcttccatatgaaacagttccaggccaacaccaagctccaggctgcctttcatcacatatacaatttccatggtctgatgcagatgcggcggctggtgtttggcttttcgctcaacggcaaggatctcttcttttgtatcttcgtaaaccagatgcatttcaatatcctccttctcaatgaactttgctatttcttcctattatatagtaagaaagcattgccgggtgtctcataacaccaggacaacgccttccaaaatcaatataatgctaaaattatttcaaacatccagcacaggaaccatttggaaatatacaggaagcccacgctgatccagctgttttttgcggtgccaaattacttttttcttctcttcccgtatccggctgaaaccattcatcctgaaatacacactgcatttctctttttcgcaaaaccttccgaaatcataaaagaactccatactctccctctgcggatcgatgacaagatgtctctcatcaatcttcacacatttttccggttctttccaatattctttcagtccatacagcgcatttaacaagccattcttttcatctgataatatcctggatttctttacgattcactcacagaattccaggatatccaggaaaattcccgttcgtttcgaagaatccaaaacaactaaatatctgctttttttgttcttcatttccattatccccatatagttgtgacaacctgctgtctttctggcatcaattttatttgacggttactaatatacagtagaatcttttctatggatatgaacaaaatgctttgttttatggataatttcatactgtttagtttttctgtctgttgttccggtgtattaaagcaaaaaagcctgccaacatacgatgtagtagtcactacacaatatgccagcaggcaatcaatcacctatgcccttttctttccatccaactcttttacttcctcaacggtaagtttcgtagcctgagcaatctcctcgcaggtcagttttccgatcagaagcaaactcttagctgtttcaagagaagtttttcttgccgtttcatttctcatctcttctatagctttgcacacaactgtcactcctcatttttatccggtcgaatatttttcagcattccttttttaaatagctgcaaattgcattcagcatttctaatgcatgctgatattgttcttctgcatcttctcttgacacaataaaaaaatcactgtaatcacagttgtttctaatttgaaaagctgcctgtagatatttagaatactttttatcaaattctcctgtttttatatattctttctaaaagtacgctatgacacctgcgtgtttcttgaaatcaatcccatctttcgcaagaaccgaacgaactccggtaaaaatagaataatctgcctatggaatctttataatgtcctgcatccagcagtatctttgacgattccagtttttcccgtgcattctctatccgataagataccagatcatccaatttttcttccctcctttacaatatttctataataaggaagtttttccttgtattgttcaaattcgtcatatggaatcaccgtaggagatacgctaacatcatatgcaagaccaacttctgtggaaaaatcccacattttctttaattttttttgaagctccacacgatttcctcttactatagctgtaatatctatatccgaatcatcggagtaatctccgcgtgcataagatccgtataagataattgtatcaatactgtctccgtaaacagaacgatagtaattaaccatttcttcttctatcgcttctagttggctttttgtacacatggcatctggcctcctttcccaacgtagattatataactgctttttaacattttaccctatttattatgccatctacaactcttatttttatatcgaggtttttctccattcacattgctaggcagacagaaattgaatcttccgaaaatattcgaattttcctgcttatggctaaattggcgaatatatctcgatttcaaaataaatccccaaaaatcattcaaaatatttcttttgaactcttttcgatgtttcaatcacattagaacagtctatgaactctaattctatatactatatatgaaaccttttttattaactgtacgcattatgtgaaggtataatcatggagaaacttaatgagaagctgaaaaaaagaatttcagaggaaatttacgaaacttgcgttaaaaaaaaatttttaaaacacgaaaaaaaccgaatacaacatccgtgctttagaaaaaaacattactgcaaaatacaacgcacaaaaatatatcaacattgatcataaaacaagctggtatcaaatcgataccagctaatgttttaacttgatattatattatgatatgtcattacattactctgtaaaattcataaagggaatatcataggcagcaaaaggcgatgcagatgtaattaccgaaattgtcggtcgtaaataagctaataataatgccggtgcgccctctttttaaattccaagatacattcttatgattcctaaaatcagcaaatgcaccggatagaaaagataatttactaacttattctgttttccacgctctccattgtaagtaagtgtcagtccaaatccaagcagagcccacggctctttaaacatagagatgtaacaaaacggaattccaagtgcccatctctcatgaaaaatataacagaaataaccgatcagtaccgcatgatgttcgtagtccagacttgcattcattgctacaatgcacaacaccgctacaatgagaaatgatacgaaataccacaaagccttcggtagtgacgccatctttcctttcagtacatcgatcacccagatcatagcaagcacaagtgccagtgtaaacataatattgttccagttgatttcaacaaatctagccgatgtgcacatatcaaacggaacctctgatatcactccaaatacaagaagtgtaactaaatttctccatttagtgcttgtgtggaaatatccttccacaagaaggaagataaatatcgggaaagcgattcttcctaaaatatcaaaaaaatcactcaatcgattcaatgctcctccatccagatttggatagatcaatgccttattcgtatggtcaatgaacatcgataaaaaagcgatatatttcaattgcgctcctgagaatatcttgattcgttcttttatattgttcataagtttttcttttcagacatctttcttaattctattctagtaattttctgcgtgaagctcaaagtagctctgtggatgcgcgcataccggacagacttccggggctttcgttccaactacaatatgtccacagttgcggcattcccataccttcacttcgctcttctcaaacacctgcgcagtttcaatgttcttaagaagtgcacgatatctctcctcatggtgcttttcaatttctcctactgctctaaattttgctgcaagctcagggaaaccttcttcctctgctgttttagcaaagccatcatacatatctgtccactcgtagttctctccttctacagcagcagctaagttttcttttgtatcaccaattcctgctaattccttgaaccacatcttagcatgctctttctcattgtctgctgtttttaaaaataatgctgacatctgctcgtagccttcctttttcgctacggatgcaaaataagtatacttatttcttgcctgtgattctcctgtaaatgcctcctgtaaatttttttctgtctgtgttcctgtgtacttgttagcagccatctcttttacctccgttttctttactactatttcaaaatctcatgccatcatttgccataacgtgtcttctcatttcgtatacggtatttcttacaagatctttttgaatggtatttctcctacttgtcattcgtcctccttattaggattagttcttaataaggactatataccactattatcctgttgccaataaaaatagtaataattctcattattataaaaactaccaaactgagcatcttttacctgaataactattttattttgcgttcaaatacatattttgaatctgatgataaatcagacctaaaagaatatccaattctgtcaaatttctgaatttccaccggattttcaatattattttccgatatgaatctgaccatttcaccacgagccatcttggcataggtactttttgttaccaatttatctccggataactcacaaaatacaatcgtaatatatctgtcctgtggtgtcagatacttttctatacattttgagtattcttttgatgcaagattaatgataatcctactgtcatcgattactgagcggtataacaattctccccagtactcatacagattttttgcatctccaattccaacctttgcctgcatttcaagacgataaggagtcacaccatccattggttttaaaatgccataaaacgcagacaagattcttaaatgattttgcaaatactcaaactgctggatttcaaacacagatggtgccatatattgaaatgcaatcccttcatatgctaaaacagccggagtaagcctgttataaagatccatattttccaatctgttaaagctctgctctgcaatcttgtcattacatttccagatagctttcagttcttcttttgatttgcttttcatccagtttaatacttctgctgtcttatcaatatagacaggcagttcaaccggtgctaagttatcggtatctacaatcatcttttttgcaggtgataaaataatcttcattatgccaattccttaagcatattttcaggatcatctgccgccttgactttatcatttgcctttataatgattccctgctcatcaataagatatgtagttcttactacacccatagatacttttccataatttttcttttctttccagacatcatatgcttcaataactttacgctccggatctgctaatagcgtaaatgccagtccgtatttttcttcaaatctcttgtgagacgctacagagtccttgcttactccgagaataacagctcccttctcagtaaactgtggataacgctcagaaaagccacatgcctgcttcgtacatcctggtgtattatcctttggataaaaatataagatcacttttttccctgcataatcgcttaatttatgcacttctccgttctgatccggcaattcaaaatccggtgcctttattcctaactctaacatttactattcctccgcttttgttttttccacctgttttcttgttcttttactacctgaaatcattttatgaccagaatagactgtcataatcatgcatatcagagagccaaatgcaaagtatttgtgtgctgcttttaaccctttatatcctgtataaaaagttccaatcattgtgattaaagttcctactgaccaatatttatgtgctttcatgtaatttctccattttttcagtgtattcaattctaattatacgctaccatattcctatgtcaatttgataatagagcattcctataaaatttttcaaaatatcattgtcaaaactatgtattgttatcctttaatttttctttgaaataattgacaaaaagcttgctttcaggagattactatttaatctcttttccatctatatatagttgaaatttatcaggaccattgacaacatcatagtcctttccgtattctacaggtctatattcggctgtcattaccgattccccgtcttcaatatcctctttccataaatagatgttcatatcaatgctcgtcgcatatcctctgtctgtggagaattttgtcgaatgaaaagaatcatccttgtacatctgcaaaagttttcttgcaaacgcttctctatcctcaatatcttccctatttgcgaccacggttatattttcatccagatttacagaaaaagttccaactacatctggttcgccttctttatgactggattcaaatttcccataaatacttcctgcagcaattatcaagattgctgttcctgaaattactgcaattatctttttcttcatatttttaatttccttttaatttttttactgcgtaattgattacttcttccggtgtgggcctgtctcctttaagtgtcattttcttccattcttcctgcacagccgcgtcaggattatcaaatcctgcatctatggctatctgcatttctctgcgtacttcttctggtgttgtgttatacttttctgcaatcttctcatatatagttttctctctcattcattttcctccgatactgttggcatgaaaagtgactttacaacttaaaattggataaaaaggacaaaaaaagaagagctgcttgctcttcccatatagtagtagtaaaataatatgtcatgccagcgcaatatattacctagtatagaataaattaaatttctactatatattttgaggataatgtatggtaaaatagtgttatctaagaaaggatgaacactatgagaaaaacatatcttcctctgtcagatgaagacagagattaccttaaagcattatccaaaaagagaaccattcaggcacaagttgtggaccgtgccagaatccttttatataaagccgatggaatgacattccagcaaattgctgataaacttgccattagtaccgcaacggtacgcctttgtatttcgaagtttcagaaaggcggtttagatgctgcactgtttgatgttcagcgtcctggacgtccatcggaaatcactgatgatgcaaaagcatggatgattcatattgcgtgtcagagaccgacagaactcggttatgcacaggaattgtggacgttgacctctctccacaaatacattcagaaacatgcagaagaagcgggatatccaaggctttcaaccgttaccaaaccgtatatccagaaatttcttaaggaacaggatatgaaaccctttaaaatcaaatattactgtgaaaaacgggatcctgattttgaatcaaaaatgcatgaggttctgttggtttataagcagattgaaatgcagtttgatgaaaatggtgatctcattgttccagacgattataaactgacgattacggtatcgtatgatgagaagccgggcattcaggcaatctccaatacggtaccggatttacgcccgacatcagaacatggggaagtatatcgtgatgcagaatacaaacgtctgggaacgctctctttactggctggcattgatttactcactggagaagcaattccgttagtaagtgagacccataagagttctgattttattgagtttttaaagatactggacaaaaaatatccatcacaggataccattcggatcatcctggataatcattctgcacatacttccaaagaaacacggcgctttctggatactatgccaaagggacgttttaaatttgtgtttacaccaaaacatggctcatggttaaacatgattgaaagcttcttcagcaagatgaccagacagatgcttcgaggaattcgtgtcaataccaaacaggagttggaagaacgaatttacaagtactttgacgaagtgaaccgtgaacccgtggtttatcactggaagtataaaatggatgaaatcagtgaagaggaagcagtatcaatttaatatagcaattatttaatattcgttatactagaatatcgctataacaggaaaggggctgcattgtggcagcccctagtttacttcatcacgttgtctacattctgagtgaactcgttccctggtttattttagcatcggtctggattttgtttcataaagataaattttgccacagagcggtcgtatgttttaatgtgtccaaacagccagtcgattacatttttctgtacaagttcactgaaccgatctgttggtccttcatactcctgaaggtattcatacagttcctgaattgtctttttaaactcttcatgtttttcataatgtttttcacgctctggataaccggctttttcctgaagtgcttcttcttctttaaaatgaaagtcagtatactcgttaagataatccagaagtttgatcgcctttaccttgctgtcgccattttgacaggcaattacaaagttctgaatacggtcaatcaattctttgtgctgtgtatcgattgttttatttcctgttactaaattgtcatcaaaggtaatgtttaaatcgtaagtcataatttgacctccatttcttttatatgttctcttaggctcttttaatgtctggcagtttcgtacctgcgttttctgcttagtcttctacaggaacgaaaacatcttttcctaatccgcagattgggcatgtccagtcatctggaatatcctcaaatgcagtttctggagcgataccggcgtctggatctcctactgccggatcataaatatatccacatggttcacattcatattttttcatagtcattttcccttttcaatgtcgatttatttttgttatcaagttcctagcaatttttctaacactttgtttcttgtatatctgtattatacatgataattattcttttgtcaataatagtaattaatattattattatttacacttagcataaactgatttttgaattgcacatttacatattgtatatatcatatatatcatgggaatagttgaataaaaaaatgaactctatccattaaagacagagttgctggaaagtatttctctccaacaactttcttcgtctttaagtccttgaaacacaatactgtccaatcagattcatccaaaaagaacaggatgaactactcgaagagacacagcttatttccgaaatggtccaagccgccatcagggaaaattctacggttgccttagaccagaccgaataccagaagcgctacgacagtctttcggcaaaattcgacaaatcaaaagcaaggctcgaacagctagctcatggccgacctgcaacagatgcaactacaaagagctgaatacgaatccttcctcaagacattcaagcagctgcaggactctttggaagagttcagcatcgacagctgtaacagccttgtcgaatatgccaccatctacagtgccgacgatatccgtttcaccttcaagaatggtcaggaaatcaaggcataaatgtacagccccactactagatttcactccggtagtgaggctgtttttttatgctgcagcttcgaatatacgtttctgtgctttgagataattctgtagattaagaatggtattatcagaagagcgcaactcgtcatctgttagctcaactgcattttcactggcaagtttaatagtatactcataaatacgattaaccagaacatttaattcttccgttgtcagttcaatcttaatcttctcatagttcttgttctgcttaagctcatccaatgcatccatcagacggttgatggacttcatactcaattctccacttcgaatatcgttgatgtagtctcgtaatgctgcatgatacttcttcaccacttctggctctctgttttttatcttatggtacaccacgccaccggctgtaatagtgccagcaaccactgtaccaataatcagtccctttttattgttctttgcaaattgtagaactttagctccaacattctgcgcctgtgcagcctgttccaatttcactggtttaaggtgcttcacaatctgtcctttgtttggacccattgcaactcttacaacgcctccaattctgcggtattctcctgttgctaacttggtcatgatatccagcggaatatcgaatgcttctgtaactactgccatatatccagcctccttaaaattttacttcataatagggattgtaaattttgcgaaggttattaatcgttttcttccaccaaggcaacatccacatcctcagaatcgaaagctcccattggatattctctcttccaaccagaaatgcgaataagctttccacagtctggacactcataactttgctcgctatcaaaataccttacaaaatctggtcccataccgttttctctctcatcgctgctctccgaataaacataatcttccaaatcaacagtgtcctcagcaccgcagttagggcacttgatgtcctccatcatttctaactcaaactgccaatcatcaaaatccataaattcttcgccttcactctctcgtctcgttatctctgtcaagtagtaatcagaaggcatggaatcatactgaacaccggcatcgagcagttctgctgacaaacttaaagcaccatgtatttgctgtagtttatcctccataatttttcttctttgctcaattgcctctgtcaatgacatttctcctaaatctatgttcttgatgtcatcacatgttagtcctgcctttgtgagtactactaattgctttagtcgagtaatatcctttgctgtatacccagccttctttgtctcagacacaaaaattcccatcttcttaaaatattttagacggtcattgtttatgccaagcaattcacatacctctttggcctgtttcagcattactttttctttgctcatactcagaacctcctttctgacaccatcatacctgatggggacaatctccccgtcaagtgtttttttagcgttgggtatctataaacagccaaacacccctttgcttttgaactttgcgtatgtctctagcatctgcttcccgatggcttccgggtcataattgtttgcttcgcaaatcattctcaaaccatccggtgtaaatattcttccgtatgtcctgtcttcacacagtttattataatcttccaactgtttctttgtaattgttcacatggaagtccagaatatcctcaaaagtcttttctttcttagcactatattccgtcagcaaggccttcattttatcggcaacttcttccggaagggctgtatccctgccgccgacttcattcggaagtttcttataatctccaacagcaaaccattcttttctggaatcgctagtgccgttcttgaaaaccaagtgaagttctttgatgaacttctccgtcagagctgcttttgcatgatcaataatcatgtcaatgcagcggaagtgatttgctgtttcgatcacgtcatccacattcagcacttctttttctacgccgatggtgttgatttcccaaatatcaatttccagtgcaatccctatcggaaattgatctgaaattcatatttcgatcaacttatatgctccttttccggttttcttaaccactccctgtttttcaaattcgtttataatccgctgtaactgccgagcgggacaatgaagctgaaacgacatcttctcgattcctttgaacgacctgtcatcgtatttatagttcatgtaattccacactctttctgcaagtgatgaaagtactgcatagcaacaaaatatcttaggatgctacacatgcagattcttatgcatctcttccttaaattctctccccttaaataaaatcacgcccactaagaacaaaaagcagatcagtgctccgaacatgctcactgtcggtttcctgacaacttcgcatacaagcaggatcaccggaagaatcagaccatagacggcagccatgatttcatagatgagatattctctcaccgggcttttctgtaccttggcaattacaaacatacctgtcagagtagccacactcaggattggaagcaccagatccaccgaccagccgtgccacccggtaaatccatcccatataaagcagatgatcgaaccgatcaaaagctgccacattacatttttcagaaggttataccttttgaagaatccaatcgaagaggcaatccacattgttgccacaccaccggcagtaaaccaggtccaacggatgcggggatgaaagttcagatccgtaactaccatagctgcggcaagtaccagacacagaaaactatagactttatagactttcatctcctgttcacttggcatctggggcattggaaattccggttcgactttttctgctgttattccctgctcttttagcagacgatagaaattccgctcgatattcacggtatcgtatctggatgtaaaagcgaaggataacttatcttcaaacgagcacaggcacagctccagcttcggcgtattggtaaacacaccaaagcgttcaatataaggcacataactatccggcatacggacggcactcatgttagaaaatattgccgttgtatttttctcagaaaattttgctcctgcgtggatacaaagatttttcagttccaatggagcaagtctcaggatcggatgcaactccagtgcaagcagatcgttgatatgagcagacattttttcctttgtcagttgttcttcgaaaaaatctttggtatatctaagtacctcctcaaagcttctgtcccgctttgaaaaatcatatcccggttctatccagttgaagaaattcaacatggatgtggacggaaaaaactttcgcagatttaccggcaccatcaaaactatcggttttttctcctgcatctttgacatttcttcatggattgccttgagaaagacagccgtcagaaagaccgtcatggatacccccagttctctgcttcgctttaacacttcctttacggaaaccatactttcatgaacatgaagatggttcccatccttcttttttcttcggatctggaaggcacgtgttttcttttccttcggccgtttctgatctttggaataatacttcagaaaactgtctgattcctggtcctggacagtcatatcttccggcaacatggaaaccggctcaagcccctctttctgatgtgccagatacagataattactcaccagttccttcagaaactccgttgcaccggtaccatctgtcagcacatgaaacacttcaaaattgattcgttttttataataagtcacctcaaaaagaagtgtcttcttatcttttacataaagcctgctgcaaggctctttatactcttcctttacgaccggatgcaggttacatggctccagataatgccagaataatccttttctcagtaccataagaaacatgggaaatgtctccacagtctgatccagtgcctcctgcaaaagttccttccggacttcttcttttaattcgcaataaaaccggaatactctggtatcccttttgttactggccgcggaatacagctttgccgcattgtccagccttctccaacgtgcttttttctgattcacaatgcttctcccttcaaaaacgcattgatataagtgaaactttcctgcacatacagatgcttgattcccagtgcaaaatagccatgtagtgcacctttgatacgatggatctgtacatgatttcctgcttccttcaaacgttttccgtatgcctctccttcatcccgaagaggatcaaactcagaagtaagtatcagggtatccggctgatgactcacatcttttgccaggtaaggggcaaaatacggattttgtttatcctcttcatttttcgcatacaggtcaatataatcctgcatttttcctgctgtcagaagataatccgttccattttccttaacggagggaaatggagatttttccgtataatcattataagtggccggatagatcagaatctgtcttttcggcatgaattctcctcggtctcttgccatcaaagacagtgctgcgcaaagatttcctcctgcactgtcgccgatcagagtaatattttccggttttacatttagcacaaatttccctgtatacagtgctttcgcaaccacataacagtcctccagaccggatggaaatttatcctccggcgccagtctgtattctaccgctgccacatactgtcctgttgcatctgcaagccgtgcgcagattctttcataattatcgatactctccgttacccagccgccaccgtggacaaacaaaagcagcttcttatctctgctgtcactggttttgtcattactttcctgaaagctcttttcattagggaaaaagatacgaaccggtactgcatgacttccattatatattttttcgtctatcttcttgtaaaatatcttcatcggatccagacgcttcaggtctgccatatggcgaaatgcatccacttctacaccatcaaaagataaggcttttaatatacgttttgctgcctgattgatcactctttatttatctcctttataatttcgcatcagctacctggaattcttatatctgacgcattattcttgaacacttggtaactgtgaatatactgaactgttaccaaattacatatgtattataccaccgatttccaattattaatattgctgttttatccttaatcttcgttttataaccgtattatcatccatttcttttgtttccacatacattcctgtagcgaagtcctgaatccgtgtcataaacaattcacaatttaaaatgataaatctaatgactatccgtgaaaaaaatggtatattgttaacggtaatatttttaagcacgaaaggagcttttccttgaacacgcaagcatcatatttacataaattgagatactttttctatatcctaatggccgcgatcttcggctggtttttattcatggaattgtttggtgcagatgagcagagtgcaaaccgcacttcaacagccgcactttattccggtacctttgtatgggaaaaggcagatgggacttccgaagaaattaaagtgccgggaaggtaccgggttccggcaggagaaactatggttctcaccacaacactgccggataattatgatgagacagcatttgctattcgttcttctctccaggatgtaaagttttacataggaggagaactcagagccgaatactccaccaaagaaacccgattggttgggaagaattccgccagcagatttgttttttgccctacttcctataaggatgcaggaaaagaacttcgtctggaactgacgacttatacatctaactattccggggtagttaattccatctattgtggagatcagtcagccatctggcagattatcttccatcaatatgcacctaccacttttatcggtttctttgttcttttttccggaatgactattattttattcagcatgatccttggttttctctatcatattgattttgatatggaataccttggctggtgtatgaccatgggtgctgtctggctgctgggagaatccaaattaaggcagattctcgttcccaatgcttcggcgcttgcctccttatgttttgttatgatcattctgtgtccgattcctcttttgctttatgcagacagcatacaaaatggccggcacagacgtatgtatctgatcgccggcggaattgttctggctaattttgcaatcagttctgttttgtacagcacaggtatgaaagactacattgagatgctgccattgggccagatcatcctcgctgccgtctttgtcatggtatatgtccatctctttcagtgtctgcataagagcaaataccacacggaccggttactgctggtgggattgctgctcatcatggtttgtgtgacaattgaatctgcctccgtatatttcgtcacctcggtgtccggtatctttaccggtatcggcatgatcattctattatttgtaaatgtagtccgtacggttcgtggaatccagcatatggaagatatgcgtcagcaacaggaactggaaaggaagcaaaagcagacagaggaaatgaccctgcaaatgatgcgcaccctggctgcaaccattgaaagaaaggatcgaaataactgcggacattccatccgtgtcgccgaatatgcagcattgatcggtaaacgacttggtttgtcttctgaagaaatagaaaatctgaaggattgtgcctacctgcacgacatcggcgccatcggcatcccggatcagattttaagcaaaccgggaagactcagcgaagaggaatatgccctcatcaaacagcataccctcataggtgcccatattttaaaagatattacactggttcctcacctggttgaagtaacaaaaagtcatcacgaacgctatgatggaaccggctatccggaaggtctttccggagcagctattcctctctatgcacgaatcgtcgccgtggcagacagttttgatgccatgcattccagaaggctctatcaaaatgctctgtctgaggatcagattcgaaaagaattttcggaaagtgccggcaaacagtttgatccccgaatctctgccattcttctggacttaatggacaaagggtatctggaggatgttacaaacaaatacaaagaaatggaaaactctctgtatatggattccaatcacacgatcaataagtttatatccgatgtgtttactaccatcaaaagtcaggaagatatcactagctacgatttccttaccggtcttccattgcgtactcttggcgaaaaacaaatcgcctgtgccgttcaggatcacagtggatgtcttgcgtttgtggatatggataacctgaagaaaattaatgatgtgcatggacacaaggctggtgaccgcgctctgatgactctgggcaaacttctggcacgctttgcatcaaatggatatgcctgtcgccttggtggtgatgaattcttgcttttctttcctgacatcacccatgatgaagcttcagagcatatgacacaactgttccatcaattccatgttctcaccagagatgatgcggagattcaatacgcctccctgtctgcaggcctgtatatgtgttccggcaatgaaccattccctgactgcagttcaaaagccgacaatgctttatattatgccaagcgaaatggaaaaaatcagttttccttctatcagcctcagatcgatcatctgtccaccagtgtatccggagccggcaataatctgactcagattgcaaaatctcttcaggacagtggcagctatatgggtgctttgaatctggattaccgtgattttgcaagacagtattcctatattcatcaactggtcatccgaaaccattgcagatgttacctgatcatgctcaccatggaatccaccggtgaaacctcgccaagcatcgaaaaagctgaacaggctttattacaaatggaagaaatcatttgtaagagtattcgaaaaatcgatatctacactcgttacagttccatgcaatacctgattcttctgttccagcctctggaatccgcgatcccgaatattatggatcggatttttatgcagtatgaatcttttgattgcaataaggaatttcatccaatttatgattatcaggctatgtccgaggaagaacataaaaaatattaattactgtttttcctcatgaaaccttatattttgattttcacagacaaaaaggcggcggattttgtacaatcacaaaatccgccgccttttcatttacatgagcaatgagtcaagtccgtgcttgccctagaccttggtgcctgacaggatatttgctactgaatagttactccgatcttacgaatcagggttccgtttgctccaagtatgtcaccatcaaatttccgtgcaaaaaggatttcgccttctccttttactcttacattttcattagacgcatttaataatacttctattttatttccttcttcgtcgattttcacatattccacacatcgtccgttttcataggtatttggaaaatgaaaatgtgggcttctgcaggtcttctcattccgtctaagcatgatcaaacgattgatcgtcccaatccgctcctggttctcatcactctcgatttcgctccacggcatgcaccttctgcaatccggatcatgggcgccctccatagcaatctccgtcccgtaataaatacatggacttccgggaagtgtaaaaagaattgccagctgctggtaaaaaatatccagattatgaagccggtttatcagacgctctgtatcatgagaatccagaagattgaacaatacattgttattttgctgcatatacatcgtataacaacgatttaccatgtattcaaattcttcttttttcatggtctgatccaggaaaaaatcatggattccacttaacaggggatagttcattacagaatcatattcatcacccagcagccactgacttgcatcatgccatatttctccaagcaaatagatatctggttttatctttttcagatgctcccttatccgttttaaaaatcgatgggatacttcattacccacatcaaaccggattccgtctatatcataatcccgaatccagtcttcgcagatcttgcagaaatattgaatcacttcttcattattagtattcagctttggcatcccatcggaaaatgcgaaagaataaaaacgtctgtctctggtatccgctctctttccgatctgctcccagttttcaaccatgaaccaatccgcatagcgggaattttttccatttttcagtacatccatccaaggagcaaattttcttccacagtggttgaatacggcatccaccatgattcgaatccctttttcgtgtgcctctttacagagtactttcatggtatctccattgccaaaagacggatcaattttcgtataatctgttgtatcatatttgtggtttgactcggcttccatgataggattcaaataaataccggtaattccaagtttttccagataggataatttctgacgaatcccctccagatttcccccaaatttttcctcattggtcaccctgccctgatttcgccacggcagaatgtcttctccgtttttttccggagttccattacagaatcgatccggaaagatctgataccagatcgtatcgttcacccatgaaggtgtacggtttatatctgccggattcatccacggtacaacaaaacactgtagcatacgaccgtccatcttaagctgatcttccgtcaggaaaccatcttcaaagtaataccagacttctttttctgtatgaagttcaaaataatatttgcatcgcttataaacaggcaaaagtgttgttgtccaccagatttgatgggacagacgttttttgtatacaatctcttccctttttcctgtccacttctcatttcctcccaggattcctgcatcgaagggatcgccataatgaataaaaattttctttacatcatatccggtcttgatatttacaacaagctggttctcgtccaatgcataactcatctgttccgatgtcttatgatatacgccggcaaattccatctgattttcctccaaattatttaacaaactaaatttttagacatttgtttcggattgtttcgatgtctttactataattctttttcttttcagcgtcaatcttttttgttattcccatactattttatgcattttatattattatccacttgtatttttattaattattgaccctcagattttgtagcaaaactttactaaactattttcattgttccattgatttttacaatcacattctctataatgatattgtgggcaaaaggtattttgacccctttgataccggattgttccgtacttcgtactctcacaatcctcatcatataacgaaggtagaataactcttttttacacagaaggacatttaatcatgaccacgatccaggatattgctgataaaatgggaatttccaaaagtgctgtatcaaaggctctgaataacgcccctgacatcagcgaaactttgcgaagacaagttttagaaactgccgttgcacttggttatacaaagttacggcgttatcgaaattctgttagaaaaatatgtgtcttaatagaaaaagataatatacagtatgaagaaccttatcattttgcatatgatatcattatgggattccggcaactggcggagccacagggatttgatgttgtgatcgaacctgttgatatccagatacaacgcaaccagccttatgatgtttatatgctggaacaagattatgtggggtcttttgtgattggtttttctcttgccgatccatggcttaaggattttgaaaacagtcgtaccccaactgtactttatgataactatattacaggcaacccttccactgcctgtgtgggtattgataatggcgagggtatggaactggcggtatcccatcttgtcagacaagggcaccgaaaaattgcatatctgagcaattctcttggctctcagattatccagatccgatactctgctttcttccattctatgcgcaaacacggactgaaagcttcttatgacaatgctggttgttcccattttctttccgaatgtatggaaaaacatcttccaaactttttaaaaagtggaatgactgccattatctgcagccaggacaccattgccagtgctgctctggttcagtgtcaacagctcggatatcgggttcctgaagatgtcagtatcgtaggctttgatgatctgccaatagctgcttatacatcaccgcccctaaccaccatccgtcaggatcgaacagaactgggtaaaagtggattttttgcattatccagccttctcaatcatgtttccatcagcacattccttttgcatgcgcagctgattgaaagaaaatccacggcacgtatttctgaaaaacaatagactttggctcgtgcaagcacggactttggctcgttgctcgcgtaaaaaaagaacagtttgctttgatggaattattttcatagcaaactgttctttttatttccggatccctgttttatttgcaattctgtttcccgggaataaatcctacaattactgcttattactcttcgtaattgaagcaggtgatttacttgattcgtttggacgccgctaatttttccagaatggaatgtccgattgttccttccggcatatccacaccaaagttttctgcaatagaagcaccaatgacagcaaatgtgttctcgccttccagttctcctccgttttccatctgttccgaataggcaataaaaggaacatattctctcgtatggtctgatcctgtataggtgggatcatttccgtgatccgctgtaaggatcagaagatcatcttctttcagttgttccagcagtactccgagatttttgtcaaatttttcaatctcatggccataaccttctgtatttcttctgtggccccagagtgcatcaaagtcaaccagattgacaaagcacaatccatgaaaatccttcttactgatttcgatggtctgttccattccgttgacagagctggtagaatgataggtttctgtgattccttctccgcagaagatatcattgatcttacctacaccgatcacatccaggcctttgtccttcatagcatttaatactgtagggcctgttggtttcagcgcataatcatgacgattgctggttcgtttaaactcaccttttttctttcctacatatggtcttgcaataacccgtcccactctccattcgtctttcaatgtgatctctcttgcgatttcacagcagcgatagaggttttgcaggtcaaaagtttcttcatttccacagatctggagtactgagtccgcagaagtgtacacaatcattgcacccgtattgatttcttcctcgcccagctcttcgatgatctctgttccgctggcgctcttattgccaatgactctcttaccacaacgtttttccagttctgcgatgagttccggcggaaaaccatgttctgtaaaggtgataaatggtttttctgtcttgattcccatcatctcccagtgtccggtcatggtatcttttccattgcttgcttctccgagacgggcataacgtcccataggttctgcagcttttcccatgtttcctccgcagtggagattcagcattcccagcttcttcaggttggggatctccagggttcccatctgatccaggatatgtccaaaagtatctacccctacatctccgaacttttcagaatccggcatagctccgatacccaaagaatccaggacaatcacaaaaattctgttgtactttttcatcttcgtctacctctttctattattatttttctgccaacttccggtacagcttttctttgacagtatcactcgtaaaagccgcatctactgcattcctcatcagaagcaggacctcctcatcccggactccgtatgttttttgaataaattccagttcctttgtcatggtcgtgttgctgacggtccggttatctgtattcacagtaacccgtacaccatgatccaggaattccctgatcggatagaattccggaccggataccgccttagtctgcagattgctgattggacacatctcaattccgatctttttttctgccagttcccggatcacatcctcatgacctctcatggcaatcccatgtccgattctctttgcaccaacattcactgcatctgtgatattatccacacttccgcactcgccggcatgaatcgtaaagggcataccaatctttcttgtattttcaaacagattcatgaattgtgacatgggataagaagcctctgccccagccaggtctgctccgcagacaccggatccaagaagttctcttgcagcccggatcatccgccagttttcttcctcgccgatatgacgcatggcacaggcgattactccgtactcaatagcgaagtcctgttttcctctctccagccctttgatcagtgcttccattgcctttttgcagctcatggattctgtttcagaaaaaagtggtgcaaagcggatctctgcatagcatacatgttctctgctcatatttttcaatacatcatagccggcctcttccagaccttcttcatctttaagacactggcatggcatatcaaacttttccagatattctgcaaggcttgtacagtcatccgatacgctcaattcttctttttttacagatcttcccagccttttttcgataaattcctgactgagagatccatccaggtgacaatgcagttccaccttcggcaatcttagcagttcttcctgtgtcataacttctcaccactccattccatgttcactactgccgctctataaaagattggatggcccaaatcccagcggaagcagttcatttagtgtaaaaatatcatatttttctttatctactgccagaatgatctgaaaggtttccggatcgcaaaattccatcataacctgacggcacacaccacagggtgccgcatattctgtcagtactccattcttaccgcctacaatacagatggcctgaaaatccctgactccttcactgactgctttgaaaatagctgtccgctctgcacagtttgtaggcgtataggatgcattttcaatattgcagcctgtgtatatttctcccttctttgtcagcagtgctgcgcccaccttaaagccggaatagggagtataggaaaaatccaactgtttgattgctgtgtcgatcaacttttcaatcattgttttttccatattatacaccgttactgaaaacttataaaaagttataaacttttatgtttcattcctgcttcagcgagcatgcttttgatgatataaatatcaatctactcacaagttcttgtactctccacaggcgtaaattccgtactaacgtatccgtacatatttgcattaacgtttcagtgtcagcttgcaaatctttctccataagccttgaggtttatagatgcctggaaatctctgtcaatcctattcccacactcacatctataaattctgtcagataacttcagatctttttttatgtttccacaacagctgcaaagctttgacgatggataaaaccgatcagccactataagctggatccctttatcactgcacttatattcaagctgttttctaaacctgaaaaatccctgttcctgaactgctttggataaatgtctgtttttcatcattccgctgacattcagatcttcaatacatataaatcttggttttcgatttacgatctcagatatggtctgattcaaatagtttttacggatgtttgttaatctgtgatctcgttttaataaaagtttttcctttttgattacattatttgttttacagtaactttctcctctcttatttttctcgtaagaacgagagatactacgctgtaatctgcgtttctgtttttctagtttctttactttctgactcttattgatgttcttatattttacagcatcagagcagacagccagatctttgattcctaagtctatgccaaccccatcatcattaagcgtttccctgcaatcaggaaattccacacatacactgatccaccagttcaatccgtcaaaagatattctcggattcatatatttagcatctgtaggaatgcgtccatgttctgcaagtcttacccaattcattttttgtttatttgctttcctgccggaggaaaagccttcaaatttaacgtgggtattactgaatcgtatcttaacattgtcctgatagaacttcggcacggatctctttctggacttgaatcttgggaatttttgcaaacccttgaaaaagttcttatacgcagtacaggcatctttgattgcctgtttggttacattatttgaaatactcagtaaccatgcatattcatcagaatgtctaagctttgtaaattcttttctgagttctgcatctgaaacgaatctgccacctttttcataattttctttttccctggccaaagcccagttataagcaaatcttgaagcacctgcgtactgaaacatcttagttttctgtacattgtttggtatcagcattacttttatggcttttatcatctgtttcctcctgtatcagttccctgataagtttcctggctttattcgctcgttttccttgtaatttacagctgaatactgtgattatttgaaccagttcttcaataaattcctgctgttcggatttttcagtatgatcaataatctcaatctcacaattataaagtgaagcgatatattctatcaactcaaagccaaatctcaatagcctgtctttatataagacaacaacctttttcacctgattttgagatatccgtctgagcagctcctgaagtccttttttcttataattaatcccggaaccgatatcacttattatctcaaatggctgtcctttttccagaagatatatcttaacattatcaatctgtcgttccaaatcatctttttgtttatggctggaaacacgacaatatccaattgtaatgcggtttttaggctttacattgattacctggttgagttgctcatcagaataatatctatagccacttgctgtagtatgatgcggatgaagttttccattggcatcccaatttcgtaatgtctgggcagatacgcctatgatttttgaaaattcatgtatagaataatatttactcaaagaatcatctcctttcaataatattccactctaatatcttataaaactcaacatgtgcttatataattttataatctatatttaactgttaatactctctcgttcttttaataaccagttgcttcctcatttttcacaattttaacaattcggctggttcccagacggtctgctcccagtgccaggaatttttctgcatcgtcgatagaagaaattccacctgctgctttcatctttacattcggtccgatatgttttgcaaacagttcaatatctgcaaaagtagcacccgctccgccaaaaccggtggatgttttgatataatctgctcctgcgctggtaacgatctcgcacattttgattttttcttcagccgtaaggaaacaggtttcgatgatcactttcaggattttatctccacatgctgcttttaagattttgatttcattttcaatcaagtcatattttttgtcttttaaccatccgatattgataaccatatcgatctcagaagcgccgtttgccagggcatctttggtctcgaattcttttgctgcagttgtcatgtaaccattcggaaaaccgataacggtacataccgggattcttccgttcatgtattcggctgcctcttttacatagcttggcgcaatacatacagatgcagtctcatatttcatggcatcgtcacagatctgtttgatttcttcccatgtggatccctgaagaagcagtgtatggtctacgtgttttaatatttcattgatatccattttttatctccatttcttatatcattatttttctgcctggtctgctttgatcagattacggatggcttccactgccacctggatcgccatatcggtatcatgtaccaccggattctccaggcccaggctctctctctcctgattggcaactaccaggaagcaggaaccggctcttactcttaattttcctgcaacgatgaaaagtgctgcggattccatctcagaggcaagacaacccatcattttccatgcgttccatttgttgatcagctcatatcctaccggcattttttccggttcatgctgtccgtaaaacgcgtccttacactgtaccacaccggtatgataggtataatcttttgcttttgcagctgcaaccagtgcgttggttacatccagatctgctaccgccggatattcgatcggcgcatattctttggatgttccttccatacgaatggctcctgttgcaataaccacatcaccactctttacttctgtctgcatacctccgcaggttccgattcttaaaaatgtgtctgctccgcagcgatacagttcttccatggcgatggatgcggagggtccaccgatacctgtggaagtaacacttacctttactccgtccagtgttccggtataagtaacatactctctgttatctgcaatcagcaccggatcgtcaaaatattttgcgattttcgcacaacgtttcggatcaccgggcatcagcacgtaacgtcccacttctccttttgccacctggatatgatactgtctgcttgggtcttctgaataatttttcacgatatttccacctttctttatctctgtcccttatcatacggaataccttccgccttcggtgctctggagttcttagatacaaatacgagcgccagcagagagatgatatatatgaacatattatacaatgttaatgtccttctcgggtttctccatttttgaacttataaatataatatgacacatgtacacaatcgtccagacaacttaccttcttttttatctattctttgtattttgtctgattttgctaattattcttttcttttttatatatttttcctatatcttacttttcggaatccattcttttattatttgtaactgttcagtaccttcacagttacgagccaaaatgcatttaaacgataaaaacacgctttgcgattttttatcgttatcgcggcactcctcaaggttccgtgcaagcacggactttgactcgttgctcgcgtaaatcaccttcggtgatggcattttggcttgtatgtctcgggattttgacatattcatgtcaaaacacctcgcgggacagtggcaactgaatagttactattatttatacagtatagccaactcaaaccaactcgcgtaactatgagaaagataatccgcggggttctcaagttatcgcagcagtcgccaagatctcgtgcaagcacggactttggctcattgctcgcgtaaaaaaaagagcacatatctttgtttttgatatgtgttctctgttttctttgtcgatgctttactctatatttaattttctgaatgcttctctgttttcaacagtttgtctgttacatggatattaaagaaatggacaataggaccaaggccaaacgccgcgatcacagttccgattccaaccagacctcctgcgaaatacgccaccagtgcgcagatcacatcgttggacatacggcaccagaagtaagatatcttcggaagcttctcatccatgataagtgacagactgtcatatggcgacactcccacatccgggcgctggtacatggatacgcccagactgcagatgataaccccgatcaccataaccggaatccgggtcagaagtacacctggttttgtaaatacaaaatcccatatattatagaaaaaagtagcaatatatccaagaaacaatgtattgataatagttcccagaccaataaaatgtcttccggcaatcaactcaataacaaataagcccacactgaaaatcgcaaaaaatcttgcatagggaatgccgaccacatccgacaatgccatcatcatggcattatacgcatcattacccagaccggcgaacttaaatatactgacacccattccaagaaaaacattacccagcagcatgatcaggatacggcgcatcccaatctttttcacatactcacccactacatttttcctccatgattctttttctcataactattcagcatcttcacaattgcttacatttttctaactttttcaaagattttctgaactttcttgtctttcctatatttatcacttataatgaatataaagaaagacttgctaaccacccattcttttaactcttttgttgcatacattgtacttatgtcataaccgttcaatactttaacaactcaagtgaatattcgcaattaaagcaggtgacttacttgattctatctatagcaacaaaaaacccggaaatcatttccgacttccgggttagtagcagttcgtaggggaatcgaacccctgtttccgccgtgagagggcggcgtcttaaccgcttgaccaacgaaccttgcacgattataatactacaccttttgggaaaatgcaagtgtttttttcaaaaatttttaatttttttatttttctatattttcatgaaaaaggaggcattaattatgaaaaagaaaaccttacttgccccgtcactctttttgagtggcatcctgcttttctccggttgcggaaattctgcaaccacctctgcggtccaccagaataaatctgcagactcctgggctgtcgaagccagcgaacccctggatgactccggcttctcctatgacggcgaagcggatatgatggacgataccgccacagctgaaactgccggttcatcttctgactcttccgtttctgacgctgcgaccgatgctgctgaggcaacccacgaccagagcacccggaaactgatccgcaccgtctcgatggatatcgccacggaagatctcgacaccctccgcacgaaactggacaactccatcacctcctgcggtggctatatcgaatcctccaccctggatactccacaaaacggctacagcagacgctcctactacgtcactgcccggatcccttccgacaacctggatagtttcctggaaaccgccggaactctgggcaccgtcaccaacaaaaatatcgaaaccgaagacatcaccctccgatacgtcgatcagaaagcctacctggattccctccgtaccgaatacgatcgtgtcagcgaacttctcgaacaggccactgaactggatcagatcctggccctcgaatccaagctctccgacctgcgctaccagatcaacagctacgaaacccagcttcgaacctacgacaacctggtagactacagcactgtctacttaaacgtcaacgaagtagcctacgaacaacctacctccaacactataggcagccgcatcagcaacggctttcgaaacagcctctacgaagtccgcgatttcttcgtagacctcttcgtagccatcatcgccaacctcccggttctggtggtcctgatcgccatcatcaccgctgccatcctgttgatacgaaaactgatccgcagacacaaagcaaaaaaagggaacaccgccactccagtcactcatcccccaattgttcccgcagacacagatacaaacaaagatgtaaaagcaacgtcaaaaaccgaaaacaagtaattcctgactcttctacgcaaaaacttctaccccctataaaaagccagcggcgttccctcatcgaacaccgctgacagctttttatacattctcttacagtttttccatcataccatatattacataccagacattttccatccggatgccgaaaatatttcactctgattttctttcctcccgccttaaatgcacagcggcaggcacctgttccatgggggggggtggacaacactttgtgggcgcttagggcaagctttgaaatccgacacttacggagactttcgcgagggtcagccgaccctcgtgaatatagtcgcagttagtggctagttcaaagttgccctgcccacgttgtccacaccccatggaacaggtgcctgccgcgtccgtctaaccaaactaaaaaaacaagcaatccttacttttcttcatccgcgccctcgctggtcagcctcagcacagccctgatctcttcctcatccatatccagataagccgccagctcctccacactgaacttctgctcctcatcatccgacaactccctgatcgcagcctccagctttcgaaccttctcaaccatcgactcatcccgatatttctgctccgtctgctccttcacccaggattccataccgtcaagcagcctctgctccatccagcccgccttaccttcctccggcatctcttccgccagcgccagcaacagactcatattcccttcctgaatcaggtcaccaatataaatcccctgtctccacagctttctcgcatactgcaagatctccttcagatacaactgtgccagacgctcctgcacaccggcaacatctgtcactgcctgtaaaagcagagcctcccgctccccttccttttccgaagggaactgccggagcatctcctcatactccttcagacactgctcatcctctgcttccagaatcacaggcttcttctcttcctcctgttcttcctgcggatccagtgcctttccgatatccataggggcaagatctgccccctggatacggattccctggatacgaagatattcatacagactctgcaactgctgcggagataactgattcagcccaaagatctcaagaatctgctcgttattcagattcttctcctgctttgctgccagttccatcagctgctccagtttttcctgaaattctctcatatccatcatatttcgttactccctttttgccttttatttttcacggatccggctgtgcagttcctgcagagatactacttcatttttctcctgcttctgctctgccagaataccgtctgcgcttgccagtgctgctgccatcgttgtgatatacggcacacggctcttgatgcaagcctttctcacataactatcatccggcccatcctcgtcacccttcggtgtgttgactaccagctgtactttaccgttggtgatcacatcatagatatccgggcgtccttcgctccgtttgaatactttttctgcctcgatgcctgcctgctcgatcagttctttcgtgtgaccggttgccaggatagcaaatcctgcttctttaaaccgttttgcgacttccacaacctctcctttgtcacggtcgctgacactgatcaggacagttccctctaacggcagtttgctcttggttgcttcctgtgctttatagaatgcctctcccacagtgtccgcaaggcccagaacctcaccggtagaacgcatctccggtcctaacaacgggtcaacttccgggaacatattgaacgggaagacagcctctttgacaccataatatggaatctctttctctttcataccatccagtggcgacggtgcgccgctgaactcggaggtaataatctgtgtagccagcggtaccatggagatattgcacaccttggataccagtggtacggtacgggatgcacgcggatttgcttccagtacatagacggttccgtcttcgatcgcatactgcatgttcatcagaccgcgcacatgcatttcctctgcgattttctttgtatattctttgatggttttcagattttcctctgaaatattttttgacgggatgatacaagcggagtcaccggaatgtacgccggcaagctcgatatgttccataaccgccggaacaaatgcatgattgccgtcactgatcgcatctgcctcacactcggtcgcatgacgcaggaaacggtcgatcagaatcggtcgatccggtgtcacaccttctgctgcttccatatagattctcagattttccggatcgtatacaacttccatgccacggccacccagtacataggacggacgaaccataaccggataaccgatcttttctgcaatcgcaagtgcctcatccacatccactgccatacctgcttccggcatcggaataccaagtttgtccatcatcgcacggaacagatctctgtcttctgccatatcgatgacttccggagaagtaccaaggatcttcaccccgtatttttccagatctgcggacagattcagtggtgtctgaccaccaaactgtgcgatcacaccgagcggctgctccttcttataaatagataatacatcttccagtgtcagcggctcaaaatacagtttatcggaagtatcatagtcggtagataccgtttccgggttacagtttacgatgatcgtctcaaaacctgcttttttcagtgccatcgccgcatgtacacagcaatagtcaaattcgataccctgaccgatacggttcggaccaccgccgaggatcatgatcttattcttgttatcgctgaccggactttcgtctttgcagtgataggtggagtaataataagcattatccttcgttccgcttacgtggacaccttcccatgcttcctccacaccctgtgcgattctcgcattacggatgtcttcttccggaacttccaggatctgtcccagatatttgtcagagaaaccgtccagtttcgcctgtttcagggcttccggagccggcacctgacctttgtttgccagaagtgcttcctcttcttccaccagttctttcatctgttcgatgaaatagtgtttgatctttgtcagagcaaacagttcgtctaccgttgcaccttttcgcagtgcttcatacatgataaactgtctctggctgttcggttctaccagcatctttaacagttcctcttttgatttctcatggaaatccttggcaaagccaagaccaaactgaccgatttccaggcttcggatagctttctggaacgcttctttataggttttaccgatactcataacctcgccgacggcacgcatctgtgtacccagcttatcctctacgcccttgaacttctcaaatgcccagcgcgcgaatttgattaccacatagtctccgtccggaacgtatttgtccagggttccgtattttccacatggaatctcatccaggttcaaaccggaagccagcatcgcggataccagtgcgatcgggaaaccggttgccttacttgccagtgcggaggaacgggaggttctcgggttgatctcgataacgatgattcttccactgaccggatcgtgggcaaactgtacgtttgttccaccgatgacttctacttcttctacgatcttataggcctgtctctgcagttcctgctgtacctcctcggagatggtcagcatcggagcggaacagaaagaatcaccggtatgtacgccgatcggatcgatattttcgataaagcatacagtaatcatattgtttttggagtcacggacaacttccagctccagttcttcccatccaaggatggattcttctaccagaacctgacctaccaggctggcctgcagacctctggcgcatacggttttcagttcttctacattatataccagaccgccgcctgctccacccatggtgtaagccggtcgcagcacaaccggatatcccagtctgtcagcaatcgcaagcgcctcatccacgctgtacgccacatcgcttcgcgccatctcgataccaagacggtccatcgtcttcttaaattcaatacggtcctcgccacgctggatcgcatccacctgaacgccgatgactttcacaccgtatttgtccaggatcccttcttctgcaagttcagaacaaagattcagccctgactgtcctccaaggttcggaaggatcgcgtccggacgctctttcgcgatgatctgttccagtctctctacattcagtggttcgatatacgtgacatctgcaatccccggatccgtcatgatcgttgccggattggagtttaccagtacaatctcatatcccagctggcgcagtgctttacacgcctgtgttccggagtagtcaaactcacacgcctgaccgataataattggaccggaaccgataatcaatactttgtgtacgtcatttctcttactcatcttgttctccctttttcgcagaatatgtttccatattccgttttttcacgcaggaaagctcctgtcccaggacccttcccttttgcatcaacatttccgtattttattatacatgagccttcggtaaattactactgtaaagtgtggtttgcatcaaaaaaacaacccctgtctccaggagttgtcttttccttgtctatgcatctgtctgatttttaaacagttttcacatcctgctccgcgatcagctgatccaccagttcttcccgtgcctcatcccacgtctgagcggtctctccatcggagccaagctgttctttgtactccttttctttatccgcgaaatacttttcgatctccgctgatgttctcgtctcttcgcgcatgtattcccagtactgatcttccccgccaaaggaatcatacaatgctttcagtatctccccgtattccttattttctggatcatcgatgcccgcatccatggcttcccgtttctcgctgacgatctgatccagttctgtatcactgactgtataccctgccgcttccgccgcaaccgccagtgtctttctccgaaccagcgcctgaaatgccttttcttccgaagactttccatcatccgtcaccgaatcctgtgcatcttcctcacccagcgcgaaacgcttttcataattcttcatctcctgcttcgtgatctgaatatcctttccgaccgcatacagctcatccgacgtgtccgtctctttgtcctgctcctgaatcatctgccccagctcatacgcctgatcgctgctgctttttgctttctgactgcgagtcgcataaaccgttcctgcacccactacgactacgattccgatcccaagcgctacgattatctttttcttcattttcattccctccttgttcttctgttttcacggttccaaactttccaatactttgtctctgtatttcatctacattttcattctaccattacattgataccaggtctatcttttttcctgcattaataccctttccagccattcatacacaacagtaaataaccgatttctcctgccattcctcctgcaacaatatagaacactttccgatttttccagattttttcccatgttccgtagcttatctgttgcatatataggacaaatccttggtgttctgccatccacagttttccctgctgccacatcaggacaattccactcaaaagagagccggcaagtccgaagatccactgccatattttttccagatcttttttcctctgttcctgctgtttttccagatcttctgtattctgcacaggaattccggaaagggacagtgtatcaacaactttttctgcggcagcttcattcaccacctgaatccgatagtgatatgcttcccggtcagtatggctttctccctgcaaggtatcggtatctgtaacgctttctctgttttctgtatctgacattactatttctttgtatttttctatatccatatacacaaaagcagtagatttttcctgtttttcttccgggctgttgattccatatatccttactttttccccgttgatttccacagtctgatacaacagatcttccggcacatatccctgaattacatgttttttcgtatctttcagctgttttatcatgctctcatctacgattgcccatgccatggatgaatgtttcccctgactgtatgcctccggaaattgtttctgtaaatattccggatcggttcctgccaacataacttccgcctcatatccattccattcaagtaactgtgtactctcttcccacacagttaccgcctgcaccccttccatattccgtaaaacacctatctgatcctgatattcctgcgagatctcgcacaaaattgtcacagcggtctttttctgttcattcatgttttttccgcaaacagccagagcattcaggcaaaaaaataccatactccagaacagacagatgatgattgcatcttttcgccatacaatttttcccgtataacagaatatttcttttctattcataagactgtccctgttttcttctgcgaatccagccaggaagaactactccgacaatgcccaaaccgacaactgcggttacaccgataagaaactggtgaccgatcttattgctttcttttccatttttctctgtattttgttcttctatctttaacggctggatcgtcagtacaatatcgctggtttcttcatagcagtttccgttctcgtcctcataagtcagaagaatccttccgcctgtccgtccgtatcttttttctgcagtctcttcccctgcatgtaccacgcctgcgaaagcgtccagctcaccggaaacagcagttcctccctcaagatttccaaggaacagacttttatctgtctgcagccccggaacatccactgtacatctcgcattataaaccattcctcttccaacattcatcagctgtaccggtatctgcaaacggtctcctgcgttgacctcttccggaatctgaccaatctccatcgtaagttcacttttctgttcaatcgttatttctatttgtccggctgccgtaagtgttactgcgtccggattatcatacgacagctccagcgtcagtctgtattttcctgcttctgtctttttgtccgtccggatctctaccggaacttccagtgtttttcctgcaccaagtttttcataatactgtgtattcgtagcatttccaagcgaaatcccgtctccttcacatcttaccgtaacggtcatattctgcacatatttctttttattcgtatttttcagaatcactttcaaagtcacggaatctcccgcataaatatgttccggaatttctttacagtctgccacgatcactttcggttcggatgtcgctttttcttctttattttctccaccggctacaacgactgcatcccctccggatccgcctcccacaatttctgctgccggcacaatactgtctgtctcctctgaaattccactcgactcagatggcgttggttccggcgttgctgttggcgtaatttctgcctttttctcatcatggatctgtatatataccgtaaaattctgttctatttcctgttcgtccaattgaaatgttgtttttatctgtaccggataagcaccatttttcctgtcacttttcagttttagcaaaaactttatcagaaagacttctttcatctcatcggtatcattgattttttcttccgtctttttgaatgtcttctgataattctgaaatataaacggtgctgtattctgatctccaagatccggcgatgctgtcactgtctccacttcattttttccatttaacacaagcggaaggattatcgatacattttctccattcacttccggctcatatccatcctggtacgctttttccatatctccataccgattttcattatccagtttcagtttttcattccgggctgtcgactctgattccgctccccatacctgcacgggaagcagtaaaagcagcaacatgcacagtacctttcttatatttgccttcatcttttttcctcccgtatcttattgatgttccgaagatatccgttctgtatctcacagattctgtcaaagtgaactatattctcccacaagtttccaaatgccacaaaagccgtcccggaatctgtcagacatccggaaagccaggttccatactttttacgttcttcctctgtcattttgccgagtccatctcctgccaggactatttccggttccgtagaaaatgctgcgatactgagcaaaatacttttttcatatgccgtaagattttctgcatatatcatccgtttttcccataatacgctccctttaaccaccggtcttatccgttcccacgcccgttttctgtcatatcccacggcaagctgcgggagtaatatgtaatccattgctctcatccgttccagatccggaaattgttccggtatgatccctgcacaggatattctgcatgttccttcctgcgccgttatgattcccgaagccaccgcgaacatctcctgcgtatcttcccggatatcccctttgatcagaactttttccttcctgctaaccgaaaagtccacatgatccagaatcagccgctgttcccgttcccatcgggtgatctgacgcatttccaggcatatttcatccatttttctcatctgtcctttcccttatacatgtcatcgttcccgcatccatctcacagaccgtatcacacagtacatcgatatcattctggctgtgactggataataaaatcgtttttctctcacctttcagactcagaatcagttcgtgcatctgttttaccccttttttatccagtccgttaaacggctcatccagaatcagaatggatggatcttccattaccgcctgcgcaattcccagtctttgccgcatgccgagcgaatatttggataccggttttttcagtttcggatccagtcctacggtttgaagcacctcctggattctttcttttccaattttatgttgtaaggacgccaggatctccagatttttcataccggtaagatttggcaaaaatccgggcgtctctataatcacaccaatatcttcaggaaaatccacatcttttccaatctctttatagtttacaagaattttcccactggacggattcagaaagccacagatacatttcatcagtaccgtttttccacttccattattcccaacgattccatatatttttccttcctgaaactcaaaacagacatcctttaatacctgttcttcggaaaattgttttgaaacatgttccagtttaatcactgtacgcatctttttcctcctgttactcttccgttcccctgaattgaaaattatatcgtttcatctgcctcgtactcagaaacaccagaaccgtcagtatgctcccaaagatcaaaaaagttgctttcagactcggaagattatcgtatccgaaattatgcatcgaataggttgcctgattcaacggcgaaatccatcctacaatcaccctggctttataataaaattcatctggaagtttcaacagtgttttcagattatccggattcagcaaaagcccatatgcactaaacgtcaatgcactgataacccctgccagctgccctttccacagtgtaaaaaacatctgcaaaaacatcagtaccaatgcatacagtaacagcagagcaaagatacagcacatcgtctggtatggtctgctcatctccagtgtttttactgctgcaggaattcccagtgtttctcctttttccgaatatgccagcattgctgctgtataactccatgtgtttttggaaaacagatagttcatacacagtagtcctgtggaacccaggataaacatgagataacatacacaggctcccacaatatacaaaaactgccctgcgatccatatctttctgttttcacggatcagaaaaaacggcgttgctgtcgtaataaagggaagatcaccgaacagcagcaaaaacagcatggaaccaagcaaaatagaattaccatcaccaaatgtccagataaacggctccaccagctgcatggttgtctcctgttccctggcaaacagaactaatttatctgtcagcataaaacataaaataaacgcaagcaaaaatgctgcaatcacgcgcatatttttcttccacattcgaaaattataaccggctgtaacaagtatcattctgctgatcctacgcatatcctattctccttctcgctgcatccgcaaaagcatatcctgcaatcccggtcagaaacaaaagccagaaaaagacagaccagccatgcaatggccagtctgcctgtaccaccagccaatccggcggataaaacacccgacattccgggaaatatcgctcacataaaataatcagcagatattcactcataaatggtgcaagccatgccatgtatcgatgattcaccagcgttgaaatccacattccgatttctgcttccagtgctccaaaagcaaaaaactgacacaacatctgtccatatttccccaaaaaattctgtataatcctccatgaaaatcctttttccataggcagaaaaacaatccatgtacacaaaataaaagccactgtccccgctaccagaatacttccacctgcaattgcatttgtgatcgcttttgaaattatgtatttttttcgttcttttcgaaccagcacaaatttatagataccacttttatattcatccacaaatccggtcgcatacggaacagtgcacaacaagggaaaatacaaccgaatcccatctcccgtcagaactttcaaaatataactttccgtccagcctgcacccagcttcctgccacttctcagcacctctgccaccatttccagattagttacggtaagaaatatcacagtaagaaaagttcccaggtacagccattgctttcgaaacgctctttttctatcatacggtaacattcattttctccgtttaatatccgagggatgtattgattacactcccatcaatcccatttatcatcaaaaactgctgttttccccaatcttcaccatccacacgaagtgttccggaaaacgaccatgctggaaccataagaaaatcttccgtgttgcttttttctttgattctgaaaagcccttctgtgatttcagatatttcaatctgaatctttcctgtctccgttgcatccaaatccagaaatgcagattctgtaaactgtgcctgtgcctgttttttgaatgtctgataaatctcctcaaaatccatcgtttctacattttcattttctatctgtaccacatccatcggagatatcagttccacactcgtcagtacaccgttttcaaatccaatactcagggatgaataataataatttgccgcatacagatcttctgatttcagatcaatcagcgatccctgtaatgtcgtaatactttcataagacggtgtgtaggttaccattacattttgtatgttttctgcttccgatgctttatattccgcatatttccagttttccattcccagctgattttttatctcatctgcctgttttaccgcctcttctttggataatgttcctgtttcttctttgatccattcctgttcatcttcatacaggaaccattgtgtatttaaccgatagtcattctcttctctgttgtccacttccaccatcgcctgatgtccgttcacggttgcctgtgcaatcagctggctggttttgtccagcccttcataatttgcatcaccggatgtgggcattggcaggtcatcataatagccatatggatgaaattcccatgtacatggaattttttcatcggtatcactggctgatgcatattgcttttcatattctttgatttcttcttccagctccttttttatccggtctgcctcttcctggcttccataatcctccagaagtttatcctgatcacttatgcgttctttcagttggagaatcctgtcttctatctctgtcttacttttttctccaggttcatatgccgtcgcaccctcaaacagcacatccgcccaccgctttgcctcttcttccgtgatcagatgcggttttactctcaccaccggtttgttttcttccagtcccgtaacactcgcatccacagatacctctattttttcctcatctgcctgaaactgatccgtatatttttccggtactgatgtgtcactgtctttcttattttctctctgaatcgcctgttccagttttccctcgttcttattgaccacaatgtcttctgtcgggttttcggcacagccggtaagtaacagacaagagaacaacatcgcacaaaatactccgctaccttttcccatatgccctccgttcgtcatctgtaatttttcatttttattattttaaatgcttttattgtatttattttacattttcattatatttttactttattgttttgtcaacgctttcaaattgacttcaccattttttcggtatatattatatttacagtttaaataaaggagtgattttatttgttatttaagaaaaagaaatttcccaaactgacttcccgcgaagttgatattatgaatattctctggacaagcggaaaacctttgattgcatcagaaattgccgattgtcgaccggatcttactattaataccgttcaggcagttcttcggaagcttctgaaataccagttggtcgaagttgcagacattgtatacagcggtacggttttatctcgctcttaccgtccgaccattacctctgaagaattcgctgttcatgaaatgacttctgattatctggcatttgaaaaaacgctttcaaagccgttactggtttctgcgcttttagacacagaggaagatcctgtcaaagcacgggaaacgattgatgaattgcagaaaatgttagatgaatacaagaaagatttggaagaacaggagcaataattatgttagatttctctatctcctctgtaaatatggcgattttggtaagtaatctttttattatttttctggttcttattttccgaaatcgtaaggttatgtttcggcttggacttccacttctggttggattcgtgattcttatttgcgttcgtatgatatttccggtcgaactattgccgatatcccacaatgtatatcttccggatttactggccactatcgtgggagaaacacgccgtgtacgcttttttcatgatacagtatcctggtggaatatttttgagattgtatggggctgtggcatcttatattcgttgctccagtacatcaaacgtaattatgactgtcaaaagtatataaggaaacatgccgttattttatcagactccagcataccaatgcaggcttttactcagatcaaatccgaaaccaccaaaaaaggggttcaaaaaatctctttactggctcttccgccacttaagagtccggtaatctatgggcttcgaaaaccatgtattctgattccggatgctctgaaattgtcagagaccgaatggcgctatgttttattgcatgaagtgaatcattatcttcataaagacctgtacataaaattcttattacatattatttgtatgatttactggtggaatcctttttgtcggtttttaaagaatgacacagatacgatattggaaatgcggattgatcagacattggcaaataatcccgtgcatactgctgaatatttgtcctgtcttttgaaaacagcttcttatcaaatagaaaatcctctacctgtaccggatttttctataaacttttgtaattctgttctggcacgacgttttgaaacgcttactcaacccaaaaacaagtctacttctgctttagctgcaattgttttcctgagtatctcgttctttatatacgtatcatcttattttattatttttgaagacaattattttccacccgatatgtttactgatgatataatcattcctaccaaagataattgcttcgttatagaacgttcagatggagcatatgatttttatctcaatggtaaatatataacgactctacccgataaagaatattgcatccctgatataaacacttataaaaatataaatgaagcatccaaacatgaacaaattatttcagaaaaataattaatgaattggagactggattctaacctgatgcaaacaggggctgtcgcactaattagtgcgcagctccttttcttgtgcaaaaaaataactgccagacctcgaaagaatccggcagttggtgtaaaatcaagttatgctactaactaaattattacaaaaagattatacaaaaaattcagacggatatcaacttaaacttccgttaaatcttgaaacaatcattccggataatgattctgttcgattactaagtcagtttgtggaggctatggatttgactgacctatattctacttatgaaagaataaattctgtatcgcccagaacacttttgaagatcgtgctctattcttacatgaacggggattactcctctcgttccatggaactaaattgtaaaagagatatcaattttatgtttcttctagaaggttccccggctcctgatcatgcaacatttgcaaggtttagaagtatccattttgctccctgttctaaacgtatccttgcagaaatgtctaatgcattgtttgatatgggagaaatttccggagagaccatttttattgatggtacaaaaattgaagccagtgccaataagtatactttcgtctggaagaaggcagtaacaaaaaaccaggcaaaacttttgcagaaacttgctgattttgtggctgagtgtgagttgctttatgatataaaaatcgtttatggaaatacgataaaaataaggcatgtaaagaagctccgcaaaaaactgtatgcattaaaagaaactgaaaatatagtgtttgtgcatgggatcgggaaaagaaaaacttcactgcaaaagagtattgaaactcttgaaagttatttgaaccggctcaaaaaatataaccagcagatacatatctgtgcggaacgcaacagttattcaaagacagatcatgatgctacttttatgcgaatgaaggaggatgccatgggaaacggacagttaaagcctgcttataatcttcagcatggcgtggattctgaatacatcacatggcttaccataggtccccagcctactgataccacaacgctgataccatttttgaaagatgcacaggagcatttgaaattcaaatataaaaacataacagcagatgccggatatgaaagtgaagaaaactatctgtttctagaagcaaatggtcagctttcttatataaaacctgcgaactatgagatttccaagacccgtaaatataaaactgatatcggtaagatagaaaatatggagtatgatgtaaaaaaagatatctatacctgcaaaaatggtaaaaaattaggtgtagatcatatccgccactcaaaaagcaaaacaggatatgtaagtgaaaaaacgatttataaatgtgaggactgtaatggatgcccttacaaaagcgaatgcatcaaagggaataactgcaaaacacccttggaagaacggacaaagacacttcaggttgcgaaaacatttctaaaacatagaaaagaagatttagaccggatactctcagaagaagggatcctcttcaggacaaaccgaagcatacaggcggaaggctcctttggcgatttaaaacaggatatgcagttccgcagatatttgagcaaaggaaatgcaaatgttcttgcagaaagtacgttgcttgccatggcaagaaacataaacaaactgcataataagattcaaaatggaagaaccggaacacatttatttccgataaaaagtgcctaaattttgacttatcaaaacaatttttcaagccatcaagaatggcttattaaagtgcgtctttaataatagcctgtaacaatgaaaagcgttttttgatggattttatccttagaacagcaaaaaggaagctgccgcttcacgaaaattcattcgttaaagcgacagccccttccttattgtcataccttatcttttcatttatacatactcatataatccccatgtgcctcgatcagttcgtcgcacattgccttgatatcatcgatattcagctctgctgcggtatggggttcgagcatggcggcctggtagatcttttctttggatctggtagctgcggcttcgatggtcaggagctggacgttgatattggtcatattcatggctgccagctggaccgggagtcttcctacgtggcatgggttgatgccgttggcatctaccatacacggaacttccacacaggcatcggatgtcaggttgtcgatcagaccggtatttaacacattgccaccgatcttatatggattgccggtcacgacggcttccataatataagaagcatattctttggatctttcgtgggttacttttccgtctttcagaatatcttcccgttctttctcccagcctttgatctgctccacacatctgcgtgggtattcgtccagcgggatgttgtatttttcgatcatttccggatatctggatttgataaataatgggttgtactctgcgttatgttcgctggactcggtgcagtagtatcccagatgtttgatgtactcaaaacgcaccatatcgtcatgcttttccgttgcattcttctcagctgcccgtctgcggatctccgggtacaggtcgttgccgtctttgtcgtgaagttccagcagccatcccatatgattgataccggcgatcagttctcttctgccttccagcttgtcttccatccccagtttttccagcaatttctccgaacatacctgaacgctgtggcacagacctacggtacggatctttgtgtatctctgcatatagccggtcagcatcgccatcgggttggtgtagttcagaaacagggtgttcgggcagacttcctccatatctctggcaaattcttccatcaccgggatggtacgaagtgcacgcatgataccgccgattcccagtgtatctgcgatggtctgacgcagaccgtattttttcgggatctcaaagtcggtgatggtgcacggatcatagccgcctacctggatcgcattcactacaaagtcggcatcccgcagagcctcttttctgttttccacaccgagataggttttgatcgtggctctggactcgttgacattcttattgatcgcgccgaggatgatttctgaatctttcagtcgttcctcgttgatatcatacaacgcaatctccgcctcacaaagcgcaggtgtacacatacagtcccccagtacatttctggcaaatacggtgctgccagcccccataaaagtaattttcatcttcatacctcctgtacgaatctatgtattttgttgtcttccataatccatccctgtcttttcccccgattggatgaattacggttttgctatggatttattatatgtttataagatgaaaaatcctatctgttttgtttccattttattgttgatttgttgcatgttttacaaaacagaagtcgcggttcacttcgtcatgtgtttcccggatgtgtatgaaatcggtatgtcccaaggtttgtttcatacaagcataaactttgacttgttgcttgtagaataaagaatgtgccttggcacattctcgcgcctgcggcggtcgcttgcgacatctaccttatacgtcgcagtgcgcatcctcgcggagcgtttttattttacaggaaagcaatttcctgtaaagtaaaaaagagcagcgaatccacttcgcagctcttttatggttcttatgcttctttattttacttctttcagataaaactccaccgctttgaaatccccggtctggcgtggaaagttcaggccgccgtgcatcagggcgcggccgcttcttaccagttcgccgtttacttcgtacatggcatccgctttcagccctcttaccgggatgtgaatggacgggccgcttggctgtgccaggatctgcatgccgtgtaccagagcttcgctctgatcctgggatacaaactcccaggctgcgtacagacggttttccatcgggttggtcaggcggtagtattcgccttcatgggtcaggttgtagtatttcttaaaggttttgatctgttctttgacctcttctttttccccgtcgcttaacaggttcagatccagttcgtatccgaaacttcccgccatggctacggttcctctggtttctaccggagtgatacgaccggtctggtggttcggaacagcggatacatgggaaccgactgctgagatcggatagcagaaggatgttccgtactggacactgagacgttctactgcatcggtatcatcactgcaccagatctgtggggaataatacagcataccaaggtcaaaacgtccaccgccgccgctgcagccctccagtaacagatccggataacggctcaccagtcgttccagcagatcatacagacccagcatgtagcgatggcttgcctctccctggcgttcttttggtaaaacggcactgtacacatcactgatgtgacggttcatatcccatttgacatattcgatattggcactgtcgaggatcgccgtcatgcgttcgtacagataatcccggacatcttctcttcccatatccaggatcagctggtaacggcttctgttcggctgtcttcccgggatctggatcgcccagtccggatgtgcacggtagaggtcgctgtcctcggagatacattccggctcaaaccagagaccgaacttcatacccatggcattgattccgtctgcgatcggtttcagaccgccttccagcttgtcggtattgacataccagtcacccagtccgctgacatctccctcacgttttccaaaccagccatcgtcgagaaccagcatctccacgccaagttcggatgcgccttttgcgatgttcaggatcttttctttatcaaaatcaaagtaggttgcttcccagttgttgatcagcaccggacgtctctcatgtttgtatttgccacggcacagatgttcccggaaggtatgatggaagttggaactcatcttttcaaatccttcgctgctgtaggtcatgacagcctccggtgtccagaactctgctccggcttccagtgtccaggcaaatctctggctgttgatgccggcagtcagtctggtctgtcccatctggtctttttctgcttcgatcgagaagtttccactgtaaaccagtgctgttccataacatggtcccgcttcttcggtggtatctttgctgcacaggatggcaaatggattatgctggtggctggatgctcctctgacactttccacggtcatctttccgcgcatcagcggtacccgttccatctggcgttccagattgtgtcttccgtgaaaatgcatcagttcccagtcaccgctcatcaaatccagattcatggaagcagcttttgtcagcacgatcgcatcggttccctgatttacgaattttacgcaccgggtaatgatatctctttcttcccacacactgtagtataaaaatgcatgcagtccggttactttatctgccagttccacgatcagggtatcggcatctttttcttctccgtacaatgccggcattcccgggatcgcatatttgcccttttcgatggtatatcctgcataacgccagtctgcggcatcgcttccgtccgcgttgatcacgctcacactgttgatccggtaatcgccgacgccgttggtggagtattcctgtggtctggaatcgagagaatactctctctcatttcctgcctcgtaagggtttccggaaaatccccgatcctgatagtctaaaagatagctcatatcttcctgaccgatattttctccatagtacaggtgattcagcaccagatatttgtctgccatcatctgataacttgtattgtttgttgacaacgtaaaaagttttttctgttcgtctatataaattgccatgttcgtcctcctttttatcgctctgtctgcatcacagtttattgtttttacatcactgtttttcacattcaccgttatgttttgcagtctgttttctattcacagactatactcagtataccatgctgcgaaactgaaaaatataggatttgtttcctgtaattgtggattcgttgcgtgctgtatcaattttggagattttcatgtacgctgttatccgtgttttttctgcatttccattttccggacggttctttgctctgttatccgttttgttcctgtgcccgttcacattcccttttcaggatctcatgccattccggtttttctttttttaaggataacggtttcccttccctgttcagaaagcagtgactggtctggccgctgcaacgcagggttccgtcttttttatccctgatatgatatcccagaaagatttttacgccattatattttttcactgtcacctcaatagatacttcttccccgtaccgtgtcatggagtgataggctgcctccaccgtcagtaccgggctgatcacacctgcggcttccattttgtcataatccatgccgagatatgccagataatcgctccggctttcctcgaaccagcggatatagttggaatgatgcacacatcccatctgatcggtttcataatactgcacccgatggttataacccgggtattgttctgtcatttccatctgtgtctcttccctttctgtcccatacatttctgttctgtcatttttctccacatttttgcgatttcaattttaaaatgcaccatcgcaaattgttttctctcgcttcaacatttttattttcaaaaggattcttcttttttcagtttctgatagatccgtcctaccggaagtcccaccacattgttataatctccctggattttttctacaaaccgcgcacaaagtccctgaatcccgtaggctcctgctttgtccatcggctctttcgtgctgacataccatgcaatctcttcttctgtcatcgggtacatagatacttttgtctcttccgcaaaggttgtctgttttccttcctccagcagtgtcacaccggtatatacactgtgagtctgcccctgtagcatgcgtaacatacggatcgcatctgcctcatcttttggtttcccaaggatcttcccgtcataaaccacaatcgtatccgccccgatcaccatccagttctccggtaactgtggctccagctcttccttcaccgcagctgctttctgtgtcgataacgattttaccacttccacaggatctgtgcttgtgatgatttcctcaccgcctgccggatgcacttcgaattctaatccgatctgtgttaaaagttctcttcgtcttggggactgggatgcgagtataatatttttcataattctccgttttctcccttctgccgttcctgtgcaattacaattccgcgacagtattttcttctattattatgccatattctctcttttttgtgaatcgtttttcattcaggcaatacagaaacgagataaaatagttactgttcactccgtgcccagcaacacgctgcgcgatgcacagaatttatgctaatcgcataaattcgcgcgatatgtctcgggttttctgtgaccttcgctcacaaaaaacacctcgcgggatattaccagtgaacagtaacataaaatacgcttcgtgaattttactcattatcgcagcagtcgtcaaggtcttgtgcaagcacagactttgactcgttgctcacgtaaaaaaactgccgtccgaaacacttcttttcatgttccggacgacagccatattctgtgaaagtaagcagaacgataagccgggttatgtcttgaatggtcatctatctaatcctgctgttgccagcaggcttcagcgacctacctaaaaacgtgacgggcagccacatagttttttgttcggtcttgcttcggatggggtttacatgtgccctttctgtcaccagacaggcggtagtctcttacactgcctttccacccttaccaggcgaacctggcggtttatttctgttgcactggccttggagtcacctccaccggacgttatccggcatcctgccctttgaagcccggactttcctcacctgacccctttcggttctgtcagccgcgaccatttattctacttaccgaatcagtctaccacaggaaaaacttttcgtcaaatacattttctattgtattatttgtatcgtgtgatataatacaaaatacaaggaggtgttttcatgatcataaaaatcaatacactctcgcagattcctctgtatctgcagcttcgcaaccagattgtaaaaggcatcggcaaaggggaactgaccgagggtgagtctcttcccaccgtgcgacagatggctgccgatcttggtatcaataccatgacagtgagcaaagcctaccagcttttgaaaaatgaaggttttctctatactgaccgccgtctgggaagtatcgttcatattccggaaaacgaggaaccttcttctctttttcaggaaaaactggaggacgaactggaacttttaagtgcggaagccaggatccgcggaatgaacctggaagattttctcggtctttgcagcaaagtatttgtggaaatggaggtggctgtggaatgatgctcttttggattcttgcgatcacggacctgatcatggtcggcatcacctgggcggtttatggaagttcagcaacctatcgggacgggatgctccttggtgtccatcttcctgaatctgctatctccctgtctccggtggctcagctgacagacaactatcaaaaacacatccggaagttttatctgctgcatctggttcttggcgttgtagttgccattccatttttctggctggcttccataggcataacgctctggtgcatctggttttgtgtatttcttgcccgtgcagtctctttgctgtacagtgcccaccgtcagctgtatcttctgaagctggaacagggactgggcaatacgacaaaagaaccttttaccgcagctgccgacacccgtactgccatacatacccagaaggcagcactcccgctgtactggcatctgcttccgctggtgatggtttttataccgttgtttttctcctctgtccgtaactatatccacgccgatactaccggcttactctttctggttatctggatcgccgtctggctgctttttcttctgatcgcatggtgctattcgaaaaccggcaaccagatctacagcgcccattcggagattaatcttgctatcaacatgcaggaacatcgttcctggtcctggatgtttttcttctacagcctgtgcaacagcctggcctttatcagtgaactgattttcctagcaaacgatctggaatggtactggtggtcgcatctgctcttttttatcttccaaacgattccaatcgttaccattttcgtgatctacttccgcgtaaagaagaaaaaggcacagattcttgcagcagacgatgcaccaatatacgtggatgacgattattactggagaaacggctggtataacaatcctgtcgatccccggcttatagttcccgaccgtttctgcgggacgaactttactaccaatatgggaagacctgccggaaaaatcctcaccgccagtatgttcgttgtagtagctggaatgctgatctggatgtgcggattattcatacgcatggattttgtaccgatacggatgactattgatggcacacaggtttctatcacttccggttacactgacacttctttctctacagacgagatcctggatctgcagcttctggacagcctgccggacgattccttcgtccgctccaacggatccgctgacgggcatcagctgctcggtgtgtttagaggaaagaaaaccggtccgtgcagaatgtatgtagagctggatgaatccccggttctttccattcagaccgatgaatacacggtatttcttacggctccgacaaaaatacaggcagaaaactggtatcaggagctgaaagatcatatgtttgataactgacaaccgaacaaaacacaaaaggagttttcaataacatacaaacgttttttgaaaactcctttttatcactttttattcttttttctttccgttggaatcgtaaatcagttctttgtatttttccacaagttcttcgtactgttcctccgattctacgaatttctgaacctgatggtgcgctttcttatgtttttcggcgcgtggttttgcttccagaatggtataggtatcttcctctacctgcaacgcattttctatggctctggtcagaccattacagctgtatgtcgcgcccgaaacagcatcggtatccagcggtttattttccagcacttctgtgatcactgccggtgccacatggaaaagatattcctcattgtcataataagatagaattctgattttttctgctttctgatcttttaccgtaacttctactttgatttctccgcgaaagccattggctgttccctcatagttaccgtctttcagccggatctgactcgtgacatctgtcccgttttctgttttttccggatcaatcgcctgatctacagctttcagaagtcctttgctgctgtaggtcgcaccggaaaccgtatccacctctgttgattgttctttcagcactttcggaatcaactctctgataacgctctgcatataagtagcatcatcttcataatcctgcacctgcacatcagaaatatttccatttttaatagtgaccgtcacatcgatcttaccacggaatccattaccggttcctgtatacgttccatctgtatacaaccctttctctgtcacttttacatctgctgttccgcttgccgtttcatttcccgttgcttttaacagatacagattcatgcaggaaaagacaagtatggtcaccgcaagaccccagcggttacttttctgctgtttgcactgatacggacagattgaacaatctccgctgtttttgcagcttcgctttcttctgtccaaagagaaaaaggaaagcagtgtataaattgctcccatcggacacagatatctgcaaaacgctctgaaaaatactgccgatatgaccagaacaatgatacagatccagacacctgcagaaatcagattctctttgctgaaatttcctctcagcagggacagcagactggcaaatcccttccaggggctgatgacatccagcagatttttcttccagacagcactcactgccacaatcaccagaacaggatatttcagtttggaaagaattttgtctgttttcaccgaaagcatacgtttcttacggtattttgtctgttttcgtatcaggtttcccaaatcataactcagatcctgtgccgcaccaaaactacagatatatccgcagtaataccgtccgaaaaccgctgttgttacaacagtttccagcagcagaagaaccggttcccgcgcataagtaaaatccatcaccgaaaccgcatggatcagcttttttaccgcatacagactggcagcaaaagactccggtatccacagaaaaaacagaatctggattacaatttttataaccttagaatattgttttttcatcatcggataaagtttgtctgatttcctctctctgtctccggaagtggcacacctgctacttttccggcttcaaaacatttcatcatccaggccaggttctttgccagattccgcatggtctgcattccctctgcatccatcttcacttctcccggttcacagccatgtaccatgttccagtaagtagagccggctaccggcatctggcagatgccataatatttattcatcacatcgaaggaagcactgcatccaccgcgtcttgccactgctacagaagccgccggtttgaaggcaaatgctctgccgctgctgtaaaatactctgtccagaaatgacaggatccgtccacttggatgtgcataatagaccggtgtaccgaagacaaatccgtccgcctctttcgcctttgccacgaattcattgactttgtcatccgcaaacacacagccattttcattacactgtccacatccgatacagtctctcaccggctgactgccgatctgaaagatctcatactcgatgccctgtctttccagttcctttcctacttccagaagagactggtatgtattgccttctttttttgcgcttccgtttaacatcaatactttcatactttccaccctttcttttgaaaatgccagggacaaaatcactttcacccctgacattttttcatatatcttttataaatatatattttcgcacattattttacacatcaaaacagctaccgcccacgaattccctcaggatagaattcttcgggatatcctcactggggatccccacaaaataatctaggaattttaacagccgcttcgcttcctgatactccggttcgtccggaccgatctggaagagtaccggctccgcgtacagtttcagcactgccagttcatacagaagtgccgagttaaacattgcatctgcctgttcctgataggggaagatattttcatcctctccacggcgaaccgacggccacatcgcaatcgttgctttcgcactcgttcctctcgtccggttatcccggacaatccggcgaatcaatcgtccgtccgtcgtcggaatccggttgtgttcgtcaatatttaactgcgtcagcgcactgatatagatcttgaatttgctctccgtcggaagcgaatagctcagccggtcgttcagtccgtggattccctcaatcaccagaatatcgttcggctgcatctgcaggaaatcccctttgtattcccgttttcccagtttgaaattaaaccgtggcagttccacccgctcgcccttaagtagcgcattcatatcgcggttgaaaagttccacatcgatagcttccagacactcgtaattgtagttcccgttttcatcccgcggcgtatcttcccggtttacaaaataattatccactgcgatcggatgcggtttcatcccgtgagccgccagctggattgacaggcgatgagaaaatgtggtttttcctgaggaggatggtccggcgatcataacgaattttacaccgccacgctcgatgatctgctctgcgatctttgagattcttccctcctgcagggcttccgagatcagcagcagttcctgcattttccctttcgagatcttctcgttcagttcccctaccacggaaactcccatcatctcgccccatttttccgcctctttctgcacctgaaaaatcttcggtgacggcgtaaacggcggcagtttttccggttctttccgggtcggcatctgcatcacaaagccctcgtcatacggatacaatttgaaatatttcagatatccggtatgccataccatatacccgtaaaaataatcctcgaattcctcgagattatagatatttacgcgggaacttctccggtaacgaaacagtttttctttgtcatacataccatatttgtgaaagagatccagcgcagaggcggtagacacactccgtttcatcaccggtgcatgtttttccaccagctcatgcatatacgtttccacctgatccagaaatggctgatcgatcgtcacatctccatcgatcgtatagtaaaatccctctcccaccgtaaaatgcaggacaatcttccggatcttctcatgtcctgccacatgatataccgcctttaacagcagtagattcatacttcttttgtatgttttatgaccgatactgtcctccaccgtcaccagtgagatccggcagtcccggtgaatctttttatgaagttcgcgaagctttccgtctaccgttaccagaaccaccggatacttacaatcctgatcgaaatctttgacaatttctccaaaaggtgttccatccggatatgctttctccctggaacccactgttactttacacatcttaagtcccatcttcaccactcctttcagctgccgctacaccacccggtacggatgatgcactctggcagtgcctaccgcaagctccggaaacatagtttccagttcctgtctcatatatgcgataaatccatattcagttccataatgaccggcatcaattacagcgattgcctgcgcaacggcatcaattgccgaatgataatccacatctccggtaacgatcacatcggcacctttttcaatcgcaccacggatcatactttttccggagccgctgctcactgccacacgatgaatgatcgctgccggatctccgtacatccgtacatccgggatctcaaagtcgtttcttacttttccggcaaattgtttcagatccatcgtcccttccagcgcacctactcttccgatgccttccccgggagcggtttcttccagcacttcacagtccgtaagtcccagacattcctgattcatctgtgccatccccttcacatcaaagttcgtatgcattgcataataacacagatccgcctggatcatcgtaatcagtctgcgaccgataaaatctgcactggtcactttttttaccggtgaaaaaatcatcgggtgatgggtgatcagaagatccgcaccgaattccagtgcctgtgcgatcgtctcttctgtagcatccagtgctgtaaatatttttttgatttctttttcttctcttcccaccagaagtcctacgttatcccattccagtgcataggaaggattccaccgttcttccagctttctcataacttctttacatatcatcgttcatacacctccagtgcctgcccgatcagccgaagttcgtcctccagctctttttgccgtgcggtgatcttttctgctttctttccgtctgctgcgagtttttcctgtattttcctgcaggttttctgtttgtctttcagatattcctctaataccggatgtttctcttccagcagatattttccatactgtaactccacctcctgccacagcggcatttccccatgtactgcccgcatggcgggataatattttccgtcctcatataccatcttttccccggctatcacatatccatgagtcagaaggtatgaccggactttgtcgatctctgactggggttgcaggatcagttcttttacggaagcaagcaccttttcacctgcttccagaatcttcactgtcaatgccccgcccattccggcaatcaggacagaatccgcctccccggggcacaaagcctgtacaccatcggagaggcgggtatgtatatctgtttccagatcaaactgttgtatatgttcttttgcgcgctccagtggtcccggattcacatccatagccagagctgatggaattacgccttccaggcaaagagcgatcggaatatatccatgatccgttcccacatctgccagccggtttcccggtgtcacaaaagaagcattcatccgaagtcttttggataattccattaatccagataatccttcagctttctgctgcggctggggtgacgcagttttcttaatgctttcgcttcgatctgacggatacgttctcttgtgacactgaattcttttcctacttcttccagtgttctggctcttccatcatccaggccgaaacgcagacgaagtactttctgttctctctcggtcagtgtgctcagcacctctaccagctgttcttttaacagcgtaaaggctgctgcatctgcaggtaccggaacgttatcatcctggataaagtcacccagatggctgtcttcttcttcaccgatcggggtttccagagaaaccggttcctgagaaatcttaaggatctcacggactctttccaccggcatattcatctcttctgcaatctcttccggcgtaggttcacggcccagctcctgcagtaactgtctggacacacggatcagtttgttgatggtttctaccatatgcaccgggatacggatcgttcttgcctgatcggcgatcgcacgggtgatggcctgacggatccaccaggttgcataggtactaaacttatatcctttggtgtagtcaaatttttccactgctttgatcagacccagatttccctcctgaatcagatccaggaacaacatgccgcgtcccacatatcgttttgcgatgctgaccaccagacgaagattggcttctgccagacgttttttcgccgcctgatcgccgttttccatccgttttgccagttcgatttcctcttctgcactcagaagaggcactttaccgatttctttcagatacatacgaaccggatcctcgatactgaccccttccggtacggaaaggtctatattttccagatccacctcatcctcttccatatgcatatcttcattatccagcagtgcgtcgtcctcggttacccggagtacatccacgccattggcttccagatattcgaagatcagatccatctgctcattattcagggtgattcctttaaagaaatcattgatttcctgatactccagcacatttttcttcttcttgcctaattccacaaggtttttcaactgttctgcaaattgggctttatccatttccatctgtttttccatccttccatatattgtttatattttatccttaacaaaaagaaatatgcaaatgcagctttccggcttttaactcttccagttcttttttcgcctgcatcagattcatcagcccctgcatgtctgtaggtgccagattctctgtgcggtgggcgatactgtcttccttcattctgcatatcacatccagtaatgcctgctccctctcctgttccgagtccagcgggatcgtcgcgttgaatacagccgccacttcggtctgttcctcgctgtccgtaaaccggttcagcagtctcgccgggtttggctcggcctgccgatactgttcatatagcagttcagccacctgatgatagaggggtcttgtaaaatcatccggtccgatataacggcttacctctccgaaaatctccggataagaagtcagccaggtaagcatcagtttctgagatacttcgtatccgttctgcttttccttattcctgttcagacccgattttggtttgacagtctctgtcattcccacgcccttcatcgccagccggttcaccatctttctgagttcttccggctcgacctgataagttccggcaatggttttgatataactgcttcgttcaatctcgtcttcaaaacgcagcagccgctttgccgtttctttaaaaaagtccgtgcgaccctgcgggtcctccatatcatactgcccttccagtgccttcagttcaaacataaaactgttcattccgtgatccagcctctcctgaaaggcttcttttcccatatttttgataaattcatccggatccttataaggcctgagattgatgaccttcgtggaaagtccggcggtttttaacatcgggatggcccggagagctgctttcacacctgcttcatcactgtcgtaaatgatcaggacttcatcggtataccgtttcaggagactggcctgctgagaggtcagagccgttcccagagacgccactgcattgttaaatcctgcctgatgcatggagatcacatccatgtacccctcgcagatgatcagatttttctttctcgaagaacgcgccatattcagtccgtacagattccggctcttatcaaagatcttcgtctccggtgagttcagatatttgggctttgcatctcccatcaccctgcctccgaatccgatcacacggttgttcacatccatgatcggatagatcacacggttccagaatttatcatacatgccacgtttttcatccacattaaacagccctgactgccgtaagagctcatctgaatagttttttcccttcagataccggtacaggttgttgctgaacttgcaggaatacccaagaccaaacttattgatggtctcatcactgagttctctgcccttcagatatgccatcccctgttctccggttttctggcgcagctgataatagtagaacttcgccgcttccttgtttatctccagaagtgcggatttcaggtctgcctgttctttcgcttctttggaatattccattttgggaagttccactcctgcacggtccgccagcatctccagcgcctccgggaaagtaaagttctcatattccatcagaaaggtaaatacattaccaccagctccacatccaaagcaataatacatctgctttccggggcttacggaaaacgacggtgatttttcattatgaaagggacaaagtccgaaataggaacttccttttcgctgcaatttcacataaccggaaatcacatctacaatatcgtttttcattcgaatttcttcgatcagatcatccgaataacgcatgttttctctctcctttatccactgttgtcatttacccacgtatatatatattccccgtccggcgacaatatccttttttatttgtcccggttctctttttctttgacaaaatatgcatttttttattcttcttcgcaacggttccccggagggttcagtatactgcccaggccgaaggaataaaaatttctttgaatttcgccatcgcatactgatccgtcatgccggagatataatcacataccaccctttctctgttctcgccttctgcgatcagtttctggtattcccgggacatctgttccggatgcctgctataatacagatacatctcctgcagcatcgtcctggcttttctttcttcttttttcgccaccggattattgtaaacgctccgaaacatcaatgtgcgaagttcccgcatcgcctccgcaatctccggtgtcatctcgactttatcttttccgtagctgttgcggatcgtatcatggatcaacgtatttaaccgctctttgcaggaatctcccagtgtcaccctgattgtgatcggaatatcatcttcctgaaaaattcctgccctctgtgcatcatccatatcatgatgaatataagaaatcttatcacacagtcggactacctgaccttccagggtatgcggtgtgccggatgtccggtgattcaacatcccgtcccttacttcccaggtcagattcagtccctccccgttcttttccagccgttccaccacccggacactctgcttaaaatgtgcaaatccttccgggcagatttcattcagagccgcttcaccggcatgtccgaacggtgtatgccccagatcatgccccagcgcaattgcttccaccagatcctcattcagctccagcgccttcgcgatcgtccgcgccgtctgtgatacctccagcgtatgtgtcagtctggtccgataatgatctccctgcgccgcaagaaacacctgtgtcttatccttcaaccgtcgaaacgccttcgaatgaataatccgatcccgatccctctgatacaccgtccggatatcacactcctcctccacacgctctctgcccttcgactctctgctgtgtgaagcataccggctcagatactgaaactcccgctcctctgcctgttccctgatattcaaatacatcaccccttctattaccaaaaacagtaaaaaccattctattttcatctattctgttaaatatattccactctttcctcacaaaatcctttttattttccaattttttcctgattttcacttaattgtgtatacatttgtcgaaatcctcacccggtttcttccgatacgcagtgtacttatctgatcagtaacaaagaatgtgccctggagcatcttcgcggagcgttttctactttactgtaaagcaatttcccgtaaagtaaaaaactgccacaccctacccagagtgtgacagtctcttctcacttcatcaaatgcacatccgcataattgcaccccagtgccagagcccgctcatgatcatccacatagatgtcaatatgattctgctttactccactgccgcaatcctgtgccgtaaaaatatgtccattaataataactttcgttccataaggaatcactgaaggatccaccgcgatcgtttccccttccgcaaccctcgctccggaagcagtaattccggttgcctttccacaacacttcgcacacgcacagtaatatgtcagcttaaaaagtcccagatcctgtccgtacattgcttccgttgcattcacttcactgatatccttacttcctgcaatcactttcgtatcttcaaaaagctccagggcaaagttctcctgttccggatctatctttactgttaccaccttgcctctcgcctcagaagcctgtaccatcttgccgtcacccacataaataccggctgcacttgttccttccccggatccatagcagatcacatcaccgggttttgcctgatccacagaaacctttccctgttcctgtatatttccgtctttatccgtgacattatatccgtatgcctcataaatctgctcaacaaactcgctggtatcaattccttcgcaaaggctggttccttcttccttccagacagttccaaggaatccactggcataatccacgatcgaatcacggatcgccccgtccggaattcccgttttcaccgaagtcaacgtataataacgtgccggattttctttcggatctaccttggcaaccgccagcgtaaaacgatccgctccggtcttattcacttttctcttcactttcctgcctgtctgcagatattccttttttgcaaatccacgaacttctccggattccacatatacccactcttctgtctcatctgcaagaatataacagagatttccctttttcatcgtaccgacaatctcactgtctgtgctcttgtccgccctgatattcagttcatcccctttgcagagtgcgtaatgcttctttgctgcagtctgctgaatcgttgcccggtaatatgcatatgcctgattttctgccggcgcaagcagctctgttgcatataccggagtaagcagcgcctcattcttatctccgattctgcgaagcgcttttttctccacaaaaccacgaacggttccggattccacgtagtaccatccgtcttcctttcttaaaatataacagataccgccttcttccagccttcccacactccgggaatcctgtgacttctcttctttgatctcctgaaccactttcgcctgtgccgcttttctgctggcagatactgtccagaaacggtaatcctccaccgtcaccggtacttccacagactgtggaaatgctgtaataaccgggatattttcttccaccgcagtctcctgcgcagcttccggtgtggtctccggtgccggtgtaggctccggcgtgggctgttctgtcacttcctgtggttctgcaccttcctgacccggtgtgggtgttggagtattctctcctgccggcgtcggtgttacagtcggctccggtgtctgtgtcggcgtcggcgtgggcgtttcacttggtgttggttccggggtggcaaccggtgtgatctgcggcgaaccatctgcctgcagaatcacaaacccgttattcagtacgtaggtatatccctctgataaatggtatcctgttcttgcctcatactgttccggtgtttcctgtacttctgccgctgtttcagctgtcggtacactaagttcttcttcagcagccttgactggcgctgccacagacaaagtcattatatatgtcatagacagtgccagcatacgtttccattcttttcttatcactttctggtatttcctcctgttacttcacgttacgtatacttccctggttattaattataatccttttcattgcccatgtcaaaaatgtaatacttcaattagcgacattttttctgttcctgttcactccgttcccggtaacacgcttcgcgggatcttatcagtgaacaggaataattctttcaatatagctctgcgattctcgtgattcccacatagatttcctggatcttataccaggtcggataatcaacgactcctgtctgtcccagtccaaaaacggactgaaactgccgtactgcttcttttgttcgctctccgtatattccatccaccggtcccctgggaacttctgtataaacctccccgatagtatttaactgttcctgaatctgcctgactttcataccacttgctccgatatccagatcgtagcccggccaggatgccgggattcccgaaatttcttctgctgaattgatatacatactttccccataatagtttctgatgatttcgatggctgtgtaattttgatcacccagatacttacttccccactgactcatccactgcgggcaggtcacccgctgtccgtcacagtactgagtcagaatcggctgacggacgttcggacgtgacaaatagttttcgaagagttcatccactatgttggatatactgtcgaaaatattgcgaccgtatatccatttgtgatcgaaggcagtggaggatgtaatggtaaagtcgtactgtttgtttctgtaccactccgtataaacccggttcagagtaaaagacatgattgccagaacattcgccttgatcgtctcaggtggccaggttgcgtatatctcgctgcatgccacgttttttatataatcccgatatcttacataataattatcagcagtggaatctgctggtgatccatcgtgtactactacatattccggtatcactacacgactcaacacaatttctccggattcgttgaccggtttaacttcttcttccggtattttttccggataattaccaaacaacgtatgatccggaatcaccacatcttcatagttaccatcgctgatcggccggagttttattttctgtctgctgatctcaccggacaggatctcacttccggatacttctatgggttcatagccttcggcttccaccttcagattatattccgaataaggttgttcttccgatggctgcaggctgtactccaccggtggtgccgccagttcgatggtttcggtctgaccgctgctgttggtccgtaattgttctagtggctgcccgggggctccggtgtagctgatactgattttcgctccctggacaggccgattctggatctgagagacaagctggatctgcagcttgccgtggtcggtataggattgcacagattttataagcgtggttgacattttattataacctcataattttaggctcaggatagtatatgcacaggagtaatgccaggcactaaaaaatgatttttctcttgacctttcatctgttttgcgttatagttccctctacgttttacttttcaaccaacaaaaaagaaaggatgataaatcatatgactttttatcaggaactacagttaagctctgccggatccaaacaattgattcataagacaaccaatccccaagaaaaaagacgccatattctggtttacaattttaaagtttatctggtcatggctttttgtgtggcggtggtctctctgttcagcagatttctcggaagcgaaaacagcgtcgtaggtgttaccgtacttctggcggttttagttctccgacaggctgattttggaatccgcaccacccatggacttggcgttattgccctcctctttgcgattctcatgaccggtccacgtctggcaaatatgcttcctcccctggcagcatttccggtacacctgacctgcatccttctgctgatgattctcggatgtcataatgttattatgtataaccattccacttttgttcttggttatctccttctgaccggatatgatgtgcagggatatgccttcttgcttcgtgtcatcggtctttttgcgggaatgctcctgtgtatgggaatcttctataaaaaccagaaacatcgtccctatcgcagaacattctcagatcttttccgggaatttgatttacattccgcaagaagccgctggtacctgaaactgacctttatcgtatccagcgccatgctttttatgaacctggccggccttccccgcgccatgtgggcaggaatcgcctgtatgtccgtatgtcttccttttacaaaagactgtgaacagcgtgctgttccaaggggattatataacatcatcggatgcgctgtttttctggttctctatctcctgctccctgaaaacatgtatccctacatcggaatgatcggcggaatcggcgttggctactctgcaagctatccatggcagaccgttttcaacacctttggtgccctctccatcgccaccaccctcttcggtctcccctacgccctggccctccgtatcggaactaacatcttcggtgctgcctacacagtcctctgcaacaaactctgggaccactttcacaccagaaccacaaccacagtttccgccaccccaaaataatattttaccccttagagcgtgtctgaaaaatcatttccgcaatctgcgagtcccagtttgcaaaaagcctttttcagacacgctctagtattccaaagctatcccccctgccagtacgcagaacccgcaggacgcacatagaaaaacagacacccttctgctggtgcccttagcacagatgagatccggcacctacgtagactttcgcgagggtccgctgaccctcgtgaatctagtcgtagttggtgactagctcagctgtgcgttaccagcgggtgtctgtttttctatgtgcgtcctgcgggttcgtccgccttgaactttctaaccaatcttacttcttaatccgaaccgtcttaacctcaaatgcccggaagttcaacgaaatctctccgttttccaccgaaatctcttccttacagttctccagcatatcacaaagataaaccttctctccctgtaacagatccgataaagtaactgttgccaaaaccgcagccttcttggattcatacagacgaagaataatatctccacttccgtcttctgccggtttcatggtatccagaataacattctctttatcaatggtgagtgcactgaacgtcggtactgcaccgccggcaactaccggttttacattcagttcgtacccctgtcttaccacatcactttctgcaaaacttccctcccatgcggtaaatgcataggtgaagtgatgaactctgttatctgcacacatttccgggcaggtacctgcacgaagcagtgtcagctccagagcatttccattcatgctgattccatatttacagtcattcaacaccgctgcaccatgtgcgccgtcagcaagtgcactgtaacggtgattgcatacttcaaaccgatctttgtcataagctctggaacgatgtgtcggatgttccacgaatccgaactgcatctcattgataccattttccgcataaacatttaccgggaatcctgcctttaacagacgatgcatttctttccagtcaacctctgtctcaaactcgattcttcggctgtctgccgccagacggatatactgtgtaaaggtggaattgctgatctctccggttactttcagcacaccttccagaccatctgcttccatggaaaccgcaacattttttgccgcctcgatttcctgatcgatataattggaatcaatatcccatgcatcaaacatacgtggtacatctttgtacagatggaagcggttcatggcatctgctgcgaactctcttccggactctttcagtacgaaagaaatcacctcgcctttttcgtttacggctgcttttacctggctgttttccatggtaaatccaccatcacatgtttctactgcaactgccttttcttccacctgaccttctgccggaatcagagaaactgctccacaggacggtacttctacagatactttcaccgtatcaccgattttctgtaccggaacaacagttccatccactgtttttgctccacccgcaaatgcatccggcaattctgccaatatctttctcgggaagcttaaggagttaaatacggtcactgcctgagattctttctgatcggtcagctcactcagtgcatctgcctgcaattcttccacaccatccagaatctcatgaaacgctttttctgcatccacataaacttttgcaatactggaacccggaagaatatcatggaattgatgtaacagaagttctttccataaagcatctgctttggaaaaatcataagccatgcctttattcattgccagagtactccacatctccatctcacgcagtgccagttcgcatcttctgttgttctgttttaccatcgcctgagaagtatacgttcctctgtgggcgctgaaatacaattctccaacataagtatttgccgggccgccctgcgcttccatatcgtggaagaattccagcggacctgccatttttacttttacgccgccttccagatcttcctgacgttttgcagattcgataaaatctcttgccggaccgccgccaccatctccatatccgaacggaagcaggaaagcatccagatcctgcacctgcacacgattctgccagattttatttacttcactcggatgtgtccgataggtataactggtcggtaagaaagaatcaatctcactgccgtccataccctgccaggtgaaataatgatacgggaactgttctccttcgttataagaccagaaaattttctgtgttaccagataattcacgccacagcctttcagaatctgtggcagtgctgccgtatatccaaaagtatccggaagccataacacttcgctgtccactcccagctcttctttatagtagcgttttccgtgaaccaactgacggatcagtgcttcaccgctggccatattggtatccggctctacccacatggcaccatcagcgatccactggccacctttgatcgcttctttgatccgttcaaacaactccggataatacttccggcacatctcatatgctgcaggctgactctgcacatatttatattccggatactgctcgatcagacgcagctgtgccgcaaaggtacgctctgttttccgatgtgtctcttccatcggccataaccatgccaggtccagatgcgcattaccaatcgcatagaataccggcatcgtagaaccgttctttgcttccatcagcggtcttaatgcttctctcgcttctttataagatgcgatccgtgcttcccgcggctgttcaaaatccacgatcagtgtaaatttctctaatgcttttgcaattttcgcagcacgcagtgttgtggaatccatcgtttccagaagacgtcccagtgtatccacatccataaacagctgatatgcatcttcgttccacaccccaaaagtggaagtacccagaacacatcttgccccttcttttttcggatctgtatatgcccccggcaacaccggtcccgtcgcgcagcgccccgttggtgcctccggataaaaatgacctgcatatgtttccatcagaatctcataggtgtcgccttcttttccgctgactgccagacagttatcttcaataaactgatgtggttcatccacccatgccgcacggtaatttccgaatgcctttccgttgacaaatacggtggattctcctccggcatccaggttcatcacgattctctttccttctgctgctttaggaaggatcacactgcctttaaaccaacagtattcccaggttttcccccatataaagcctggttctgccgacgtaaaatgcccctgtaatgcttcttccggagatagatgatccatggttcgaaaagcttcccatcgaatttcccccaacggttcataaaaatcatctctcaatgtacgaacccagtgctttactctgtcctgccattctgaatgcattaacttcatacagcttctccttttcttatattttatttttgcatacacccttgtacatccatatcatactattgatatattaatatgtcaattctttttttaaaactgttatatcaaatatcacctgtttcttttacatctgtggatcttttctgataatactgtacgggacatatttccgtaattccacttcgcctcctttgataaggcgacacagatttttcaccgccattgcccccataaggtactgcccctgcataacgtgcgtgcaatacgtgtgaaactcatatccctcttccaccccatcaaaaaagacaatctctttcctgagattctttttctgcaatactctatacaccagtacacctgtctgcagatcaaccgtaaaaaaggcggtcacctgcggatgattttccacatagttttcaatcgcttccattacctttttttctttttccctggtttcttcgatattttcaaccagactgtccaggtcgatcatccacagatcttcattcgtcaggatcttgtgttcaagcatggtatccctgtacccattaaaccgttcctccacagaagatgtctccaacggagcctgggatacaaaacaaatcttttcatgtccttcttccagcaagatattcaccagatcctgggctgccctgtaattatctgtgccaatacagggaatcggaagtcctttaagcgcccggtcgaccagtattaccggaaatttatccagtgcaagcttcacaatccttgtactgtaattttccccctgcacacacatcagaataatcccgtcaacaccaagttccatcagttcgtcaatcgctctgctctctgcctccacatttccgtaggtacacttcaggatcatatgataatttttagaccaacactcatgctcaatcccggctatcagctcacacccgaaaaaaccactgaaaaaatccagaataacacccagcattttcccttttcttaccggttccacggtctgtggcaccgccggaagattctctctgtcctgctcattctcttccagtacaaacgaaccctttcccggcatcctgacaataatattccggtcagccagcatttccagagcctttttactggtgattctgctcacattatactgttccatcaattccttttcggaaggaagcttcgaaccgggcggatatatccctttttcaatagcctccagcaaatcatcatagattttcttatacaataactctttctccacgcttatatcctttcatcttaaataatatatcatttctttttatttctattataaagcctcagtatttcactgtcaatttctatcatcttccgtctcaaccccgccggcattttggctaacgttcccccgtgcccagcaacacactgagcaatgcacagaatttatgctgatcacataaattcgcgcgatatctctcagattttctgtgaccttctcccacaaaaaataacctcttatctcttatctcttatctcgtatctcttatctccaatatctaactaccatatatcctctgcgcgatgcacagaaaccgggggactcacatagaaaaacagacacccttctgctggtgcccttagcacagatgagatccggcacctacgtagactttcgcgatggtcagccgaccatcgtgaatctagtcgtagttggtgactagctcagctgtgcgttaccagcgggtgtctgtttttctatgtgagtcccccggtttcgtccgccttgcacatcgtccttttcaggagttctcaactaatcttttatttaccttccctgaacttattaatcgcctcataattcttagacatatccacattcggatccggtgttgtctccggtccccgtttgaataccggtttcagcagaatcggcgcaataatggtcgtcaggataaccacgataacaaccggtcccataaccgccgtcgacatcattcccaggctctctcccttacttgccacgatcagcgcaacctcacctcgggagatcatacccacaccgatacgaatcgcctgataattcttatagtgacagagctttgcacccagaccacatccgactactttggtcaggatagcgacaatggtaagcacaaccgcaaatgcaacgatcgtaccattcatttccggaagacttaccttcagaccgatgcttgcaaaaaagatcggtgaaagatatgtataagaaagcacatcaaatctggatgcaatatacggctctctctgggtcatagagataatcagacctgcaaaataagctccagtgatatcggcaacgccaaaaaactgttctgccgcataggacataaacagacagaatacaaaggatacgattacatgtctctgcagacctgtaccttcccccgcactccatttgctgaagaacttatagaaaataaatcctgccacagcaacaaagataaagaaaccaataatcttcagtaacacaattgaaatcttaactgattcatctgccatactggtgatcagtgtcagtgctatgataccaagaatgtcatcgataactgccgcaccaagaatcgcgttaccggaacgggtttttaattttccaagttctttcagtgtctcaactgtgatacttacggaagttgctgtcaggatcacaccgataaatacattctgcaaaaacagactgcaggatgcatctgattcgagcatacccggacggttaaagaacgctgctacggcatagccgccaaccagaggtaccagtacaccgatcaatgcaatgatcagtgcggattttccgctttttttcagttcctgtacatccgtctccataccggcacagaacatcaggacgattacgccaacttccgctgtatcgctgataaagtcagtcggtgtaataattccaagaataccagggccgagaataactccggcaagcagtgcacctacaacctgtggcatactaaattttctggtcagaagccccaggacttttgttgataacaggatcaggcagagatccagtaaaaatttatacgtttccatttttaataaacatcctttctattataaaaatatatctctttattcataacagaaatgatgcttttttcgaccgtccatatcctgcatataacggatcacatacaccatccgctccagatacttcctgctgaacttctcaatctgtccagtccctgaaagcagagtcccgagaaacatcagaaactcgcccagtgccagataatacagcaaccgttcaccgtcctgggactgccggttttcttcttttccctcgttgaaaggcccgttttcattttcctctttcttgcagtctaccagtttcatatcttccgaaaaagaagtgagtactgtctccttctccgataacatccactgcggattgccggatggcacatgaacctgaatgcttcccaaaagaaagagaaccgccagactatatacaatgatttttctgattttgtccttttttttcatgtcatttcatcatactccattacagttccacaccgcagttctcagaacagtccccttatgtccttaaacgtaacaaacacaagcagccccatcagcaaaagcagtcctgcaaaatgcaccatgccttctgcctcccggttcaccggttttcctctgactgcctcgatcagtaaaaataccagtcggccgccatccagtgccgggagcgggagcagattggcaactcccagattcgcggaaatcagaatcatcatattgatcatcgtaagccaggtcatcagtgtgccctcacttttgctttccttataagcatctccgatcacattcaccactcccaccggaccggacagactgtccattcccagctttccgctgatcagaagtttcaagccttccagcgtactgttgatccagtaacgcacttccaaagcactgtacttgatcacacccggcgcacttgttttttcccgtccgagattgtaagaaaatccctgttccacatagttgaccgcctgaggagtcacctccacatcataatccagtccatcccgcagatatgtcagcgttattttctgatctgtcagcggatgatcttcgaaataccgactcaacgcctcaccggatgcaatttcattaccatccaccgccgcaatgtagtcacctgcctgaagccccgcatctgccagtgcgccaccgattgttaccgactggatctgcgcctgactttcatccggattataactgaatcccagcatataacgttcttccgttgcaggatgataggtcagagtttcttttttcccatctctttttacagtaactgcaatctctttatcttccagcccttccagtgtcagataagaatacagctctcttcccagataaatcttcttcccatcaaaggaagtgatcagatcaccttctttcagccctgcagcttcttccggtgtcccttcttttacctgtgtgacaaccggtggatcgtatccgataatacctataataatcattgcaccgaaaaatgcaagaataaaattaaaaatcggtcctgcggcaatgacggaaaaacgtctccagacagatttgctgttgaatgtcccttctccgttatcttctccatcttccccccgcatcatacaggaaccgccaaaaggaatcagtttcagtgaatacctcgtcgttccccgctgcgttgacagtatccttggtcccattcccacagaaaattcttccaccacgatgccattcgtctttgccagtaaaaaatgtccgaactcatgtacgataattacgataccaagaatcagaacagcgattatactactcaaacactccacctgctttccatccattcataggtttttgcttcagtttccagaatttcttccagacacggatgttcgatcacctggtgacgatccatggcctcccggatgcttcggtaaatatccagaaatccgatctgtccatgcaggaattttgcaactgcccgctcattggccgcattgaaaaccgtcggcatactgccacctctccgtgatgcttccatcgccatcggcaaccccagaaacgtctccatatccggttcctcaaacgtaatctctgtcagtgtcttaaagtccagccgttctcccggaagataccttctgtgtggataatacagtgcatactggatcggcagtttcatgtccggtgtaccgagctgtgccatcaccgcaccatcgacaaattctaccatcgaatgaatgatgctctttggctgtaccacaacctgaatatgatccagatccacgtcaaagagccactttgcctccatcacttccagacctttgttgacaagcgttgccgagtcgatcgtgatcttctgtcccatcgcccagttcggatgtttcagtgcgtcttccacttttacatgtgcaagatctgatgctttcattccacggaatggtccgccggatgctgtgatcagcaatttatgaatctctctcttatcctctccgtgaatcgcctgaaaaattgcactgtgttcactgtccaccggaaggatctgtactcctttttcttttgccatcggcatgatcagatgccctgccgttaccagtgtctctttattggcaagtgcaatatcttttcccgcctgaatggccgcgatagtcgggcggatcccgatcattcctacgatcgccgtgaccagaatctgactttcttccatctgtgccagttgcaacagcccatccatgccgctgacgacttttacatccagatcgcgaacttttcctgccaggatcttcgcctgctcttcgtcccagactgctgccagagacggatgaaattccctgatctgtttttccagcagagtgatattgcttcctgcactcaaaccggccacccggatatcctgattttctcttactacttccagagtctgcgttccgatagaaccggtcgaccctaaaattgcaattgttttttccatagtatgttctctcctccacgtcctatgcatcattttacatcagagtaatcgccagtgcgtaaataaccggtgcagtaaagatcacactgtcaaatcgatccagaataccgccatgaccggggatcaaggttccataatctttgatattttcctgtctcttaatcgcagaagcagccagatctcccaccatagataccagtgctcccacaccacagataatcgcgtaaatcagaggtgtatgagccggattcgggttataagcgcccgtcgctgccgcataaatcgctcccagaagtgcagcaccgagaacacctccgacagctccctcaatagattttttggggcttaataccggtgccatcttatgttttccgatcagtacacccacacagtatgcgcaggtatcacatccccaggaacataaaaagatcagccataccagaaaagctccacccggcagcacgcgggtctgatagatataagacagcatcacacccacataaaccataccgaaaaatgcagtcatgatctgtttattctgatattttggatacgtaaatacaaaaatgcacatcattaccagtacaccaagaatcactgccggcagatgataacttaccggcagataagcaattgtcagataataaatcacaactgccagataaccggcaatttccagtccgtttgtctttccttcatggacacccgctgcccggtataattcctgcataccgatacaggaaactccgatcaacgtcaccagaagcaccggtccggaacagataattgtagcaagtgccaggatcaccaggacaattccactgatcaatcttgtcttaaacatcctattcctcctttacaccgccatatctgcggtctctctcattgtatttttcaattgcttttaccagttcttcttttttaaaatccggccacggcacgtcggtaaaataaaattcgctatatgccagctgccacagcaggtaattagacaaccgcagttctccgctggtacggatcatcagatccggatccgggagtccggccgtatccagataacctgatatcgtatcttcactcaccggtgtctccagctttccggctttctgatcttccagcatccggttcactgctctggtgatttcatctctgcttccataattcagtgcgatctgaaaatgcagatctgtgaaatctttggaaaaatcttccagtttttcgatactttcctgaatatccgaatcaaaggcggtgatatctccgatcacttttacacgcatattatttttctgtgagatcttaatacattttttcagataattccgaaacagcttcatcagcccatccacttcttctttggatcgtttccagttttctgtggaaaaggcataaacagtcagatattttactcccagttcttttgccacttcacagatatcttccagattttcacatcccttgacatggccgaagcttctcggcatgcctcttttttttgcccagcgaccgttgccgtcaaggatgatagcaatatgatttggtactctcatacaattctcctttgctcattgaaaaagggacaccatacaatggatcgttttccatatgttgatgcccctcagctttttacgtactccggaagtacatgatattacacagttaagatttcttttgattttacttccactgcttcatctacttttttgatgaacttatctgtcattttctgaacagaatcttccagctcagcaatttcgtcttcagacacatcagtttttcccagctttttcagcatatcatttgcatcacgacggatattgcggacagctacttttgcagcttcgccttttttcttaacttcttttacaagatcttttcttcgttcttcagtaagctccggaaataccagacgaatgactttaccatcgttagtcggattgattcccagatctgacatattgattgctttttcaatttcttttaccagagatccttcccacggctgaatctggatcatccgggcttccggtacagagatattggctacctgctgcagtggtgtcggtgctccgtaatattctaccataatacggtcaagtacgtgaggattggctcttcctgcacggattgttccaaattcactgtccagattggccagtgtcttatccattttttcctgatattttacaattctctcatccatgtatatttcctcctggtctgtctttttgttactgttcactctgtctgagtaacacctttttatttcgcttttagtctaccagaacttttgttccgtcaatctctccctttgctgcacggataatactgttttcttcattcagtccgaataccagcatcggcatcttattttccatacacagaatcgatgcagtcagatctaccactgccagtttctgatcaatgacttcctgaatatgcacactgtcgtactttttagcgttcggattcgtcttcggatcactgtcataaacaccatccacagcttttgcaagaagaatagtctctgcctcaatctcgatggcccgaagtacggtagttgtatctgttgagaaataaggatgtccggttccgcctgcaaagaaagcgactttcttctctgcaaaacatgcatttgcctcatctttggaaaacagttttgtcatagctccacaggcaaacggcgtaaagatctccgttttcattcctacggaacggaaaatctcagatacatagatacagttcataacagttgcaagcataccgatctgatctgcttttgtccggtctatagtctcgctgcttcttcctctccagaagtttccgccaccgattactacaccgacttccacaccttcctcaacaagaacttttacctgttttgcgacctcagttacggttgcttcgtcaaatccggtatgcttttcgccagccagtgcttctccgcttaattttaataatactctcttcatattttcagctccttgtctgttttagtcctgtgtcagtccactgacataattctgtaccgcgcttgcatcaaattctaccgtttcctgcgcagtaccctgtgctctgtcaattttcgcatatacggaatatccgatccatccaacgaaaaccacacagacaagggcaatacataccatctccagacgatgcatgattttttctcttttcatgattttctggcgattggctttactctttttataattatctactttcgcctgactcataagtgtgctcctttgctttcagttttgccgctgtcttttggagattgggacagctgcatatctcatactgacaattataacatatcacacgttaaaagcaaagaaggtttttaaaacgtttggcttgttgctcgcgggatattaccaataaccagtaactgtggaatgctgccttctgcatggttacatcgcaacaataatcccaccgtcattcgcatacatggaactcactccggcggtatccagaatgatcacatctttcacctgcattctttccagaagtgcctcttttaccatccgtgccctctccggacagttgcagtggctgatagcaagtactttgtcactgctgttgttttctccttcttttacataatcaaccattttaaccagtgctttattgattcctctcgcctgatccagctgacagatagtaccttccggtgtggcacccattaccggtttaaccttcaatgcggaagccaccagtgcttttactctgctcagtcgcccgttttttcgcagtgtttccagattctccagtacgaaatacgtgtgctgagattcgatataagcatccacagtttccacaacctgttcaaattccatgcctgcttcttcacattcctggatcttcagtgcgatcagtgtctcccctatcgaagcactttttgagttgaatacatgaattttcttatccggatgttcttccagtgtcagactttttccaagctccgcactattataggaaccactcagttcagcggaaagagtcaccgcatacagatgttccgcatctgcctcaaaccctctctggtaaacttccggagacgggcatgctgatttcgggcactccggatatgctgctacctttcttaaaaaatctgcctgatcaaaggaatcatcatccacaatagtatctgctcccacttcaagagtcagtgctgccgatgcaaaacgttcatcctgtttcatctctggtgtcaattctccacaactatctacaattattttatatttcattacttcctgcctccagcattatatattttctacataactgtgtatccatatcttttctcatcatcgcaggattacagctttcgcttttggacttcgtcacaccctgtaattttgcctacctgatatagttttcaatactacattttactatatcatatcttcagaaaattgaaaagagattttctatgttctttttgtgtcttttggtttataatactgatatctgtttttttaaattataacttggaggttgtatggattatttactgaacagttccatggaaatgctggatgaatattatcagccaaaagacactgatgtggtgatatctctggtttccactgaagagtgtgaacagcgctatcattctctcccctattatcatattctcgcaaggaacatgcaaaatcacaatatccgatactgcaaagcagaaatgttcaaggactgtatcctgggaacccttctgattcccgataaaagaagtattgaagagactgttttatccatttctttctatatgaataaaaatctgctggttctcgttgatgattcgaaacatatccaggcgattcttacaattcttgaagagggggaacttttgaactgtaagaccatcgcagaatttctgtgtcagctcatcggcacacttacactggaagatgccttgtttttacaggaactggaacagcacatgagtgatctggaagaaaaaatcataaaacacacgatctctgactcttccgcacagcttatgcacatccgcaaacgacttctgatcctgcattcttattatcagcagctgtctgatttctgtgaggatctggaagagaattccaaccacttttttcaggcagaagaatgtcagattttttctctgtatgcatccaggatcgaacggctctatgatcattcccagatgcttcgggaatatgccctgcagattcgtgaaatggagcagtctcagattgacgccagacagaaccgcaccatgcggattctcaccgtagtaaccacgatctttttcccactgtcgcttatcaccgggtggtatggcatgaatttttctcatatgccggaactttctgctccccacgcctacgggattctgatcgttatctgcgctgttattgttttgatcgaaatctggttttttcataaaaacaactggttttcctgaatttccataccggataaccattatgtcatatcacattgggaggattttatttgttagcacttcgtattttagatttgaaagattttaccggaaaattatttattggagaaatgtttcagcatttttcttttgtggaagcttcttttaccacctttgtcacttatactctggatggacaactgcataaagaattttttgattccgaacagaaacccatgcgaacgtactgtctgtgggaagatgtgcaggcgcagtgtttttccataatcaaagggaaacgcacacctttgaattttaaaattgtcttccagctttcctcttccaatgtggaaaagctgctctcgcaaagcggcatagcactgaagcctgaagacatctacggtttgtacctgaactgtcagtttgacgggaagcaacttctttgtactaccggcacttctctgaaaattttcaccctggacaaacagctggaccgggtgtgggatgaaatggttcggaaatttttccgaaaaaatcaggtagcttttgaggatgcataacaggtcgaactacacatcaacagatttagatgcatagtctcatacaatatatagcaaaacgggaaactctttgcatcgagtttcccgttttgttttcgccaaccggctgtctttctgtcagccggtttatgtttttccatctttatgttatctgtgatttctgtatatttatctcaaaatagatccctgcagattaccgtcctgtccggatgctcccggctgatcctgtccctgctgactgttctgtgcagtggttgaagtatctgctttatccagtgtgatcgtcagtgatttttccacgtaacttccgttatccgcgatttttacaaccagatctacggtttctcccgctgcatagtactccagctgactcttcaggtcatccattgattttacagaagttccatcaaattttgtgatgacacttccggatgtgatgccggctttttcagcagcacttcctttttccacttctgctacatagacaccctgtggaatgccataagcttctgcgatagaactgtccaccgtctgtcctttgatacccagagcagctgcctgatcagagcttacttttgttcttgtctggcggttcatcagatcttcaaagatcggagaagcggtacttaccggaatagcatatcccataccttctacttctgtagatgccagttttgcagagttgataccgatcacctgaccctgcatattcagaagagctccaccactgttaccagggttgattgctgcatctgtctggataaatccgttctcggaatcagagtcttccagctgacgatttaccgcacttacaataccggtcgttacagactgtccatagcccagtgcattaccgatagctaccacctgttcccctacctgcagctgatcggaatcaccgatctctgcaattttaatctgagacatggtgtcatcagaaatatctgaaagtttcacggcgataactgccagatcgttatctgcatctgttccttttacagttgcttcgtaggcctgatcatccacaaaacatacagataaggtatctgcatcttctactacatggttattcgtggcgatcagaagttcactgtcgttctgtccgataataataccggaaccctggctttctacttcctgttcctgtgtaccactacctctcgaaaacatactgaaataatcctgtacttcctgtacagatttattggtaattgcaacaatcgacggcatcgcatttttggcgatagaagaaacatccagactctgtccggaagcactgctgcttgtgctgcttgatgatgttgtggtctgcagtgtggtcttcgctgtctcctgttttctgttgctatctgtctgtgtggactgtacttttgctgtcgcaccggttgcataagtcactccggtaaacacacccccggctacgcctccgaaaagtacggcactcaatgctaccgcaccgatcttctttgcccatttagctccgtttccatttctctttcccggatgttttttcggctctatcggtgtattattctgcggttcatttccctgctgattccaattataacttccatattcttccataagtcattcctcctgtttatgtaaatgtattcttttgttttttatttcttctttgtttatggctatagtatagaaaaggtttgtggtcaatttgttatcaaaatatgtttattttgtgaaatagttcaaactatgttataatagctttcagcgaacaggtgcagacactgcctgtttctgaaaagagcgataatccatgtactcccgagatctttctgtgtccgattttgtgagtacatcattacacaggaggttgttttattatgcagaaaattacaagttttactattgatcacttaaaacttcagccgggcgtatatgtatcccgcaaagacccggtcggcgattccctgatcaccacattcgatatccgtatgacatccccgaacgaagaaccggtgatgaacactgcagaagtacacaccatcgaacatctgggagccaccttcttaagaaatcacccggacttcggctccaaaaccatctacttcggaccaatgggctgccgcaccggcttctatctccttctggcaggtgactacacctccggagacatcgtcccgctgatgaccgagatgttcaccttcatccgcgactaccacgacgaagtcccgggcgcatccccaaaagactgcggcaactacctggacatgaacctgtccatggcaaactacctggccaaccgcttcctgaccgaagtcttaaccgacatcaaagaagaccgactggtatacccggaataaatactttcattgctatccagcggtgaacattgttgcaaaatatcagatactataaaaaggaagatagcagtacatcttaatgtacacaactatcttcctttttatatctttatatcctaaaattatttagaactctttcttatcacttattaatgaatatttcttcgtttttctcattttcttccactttttcaaaaaaatctcaccataccagccacaagagtttccaccaacgcacagcggcagtcataaaaactcttttctcctattttttcgaatagaatacgcgttcaagacacagcccctctgccggcgccgtaacgcccgcaaacttccgctccatcctctcaagcagctccggcatactgtccgcatccctcctatgctgcccaacctcaatcaaagttccggttaagattctgaccatatactgaagaaaaccatttcccgtatacacaatccgtatctcatgctccgactcttcaattactatatccgtaatcgtccgcaccgtagatttcttcatcttcggattgccacaaaacgttttaaaatcatgggttcccaccagatcctgtgctgcccggcgcatcgcctctacatccagcgcttcccccagatgataccgaaacttccggtcaaacaccgatttctgctcatccgttccaatccggtaagaataacattttccttccgcccagagtcttgcatgaaaccgctccgataccggttccacagactttacacagatatcttccggcagatactgattcatatattgcaaaatctccttcggatcccatttctttgccagatgcacactggctgtctgattcttcgcatgaaccccggcatccgtccgccctgctccatcgatctcaatctctttttctgtcattctggatagtacctgttccagctttccctgaatcgtctgggtggttttcttctgtctctgccatccttcgtaacgggttccttcatattctattgtcagcaaataattcatagatttcttactctttccagttttttacttcatcgaactctgccagaatctcctgagatggtttcttcgtgcagaggctgaagatcacaatgcagagaatactcagcgcaaatcctaccaccagtgaatacagcccggtcgcagatccaagcgtctgtccatgtaccagcggcagataatcccatatcaaaactgcaccgccaccggacacaatccccgctactgctccggcaaaattcgttcttctccagaacagggacatcactacgatcggcccaaacgccgaaccaagacctgcccatgcgttagataccagtcccataatactgttgtttggatcccaggcaatcaaaaatgccagcaatgcaacaaccagtaccgtaaaacggctcaccttcagcacttttttctcatcggattccggtttcagaatatccttataaatatctttagacacggatgaagccgtcaccagaagctgcgaatccgctgtggacataatcgctgccaggataccgcacaggaagattcctccgacaaatggcagattcgtatctttcgtaaacatttttgtgatcatctcgataaagacgctttctgtggaagcatttccctccgttccaagaatcgtcggaaacagatagacacgaccgataatgccgatcgctacagctgctgccagagaaatcgttacccatataatagcaattactctcgattttctcaactctttctgattctttaccgccataaatcgagtcagaatatgcggcattccacaatatcccagcccccaggccagctgtgagataatctctactgcagtataagaccggtcaccattccgaaacagactcagatatgccgaagcaccgctcacaacaccgctctggtcaagaatcggttttacctgatccgctcctaccataaaatacgcggcaatcggaaccaccagcagtcctactaacatcagacttccctgaataaaatcggtcacacaaaccgccatgaaaccgcccataaacgtataaatcagaataaccgcagcaccgatggccagagccacatgataatccacaccaaatacagagttaaatagttttccaccggcagacagtgcagacgctgtatataccaggaaaaagataacgatcacaatcgaagataccagaagcagtacccttcttttatcacggaaccggttttcaaagtatgccggcagtgtcagggagttatttgccctgatcgtatattttctcaatcgtgaagaaataaacacccagttgcagactgttccgagaaacagtccgatcgcgatccaggactgccctgttcccaatgcatacacggttcccggaagtcccattaacagccatccactcatatccgacgcctgtgccgacagcgcagccacccagccactcagtccccttccgccaagaaaataatcttctgaattattcgtatttttcatgtagatcgcaccgatcgcaatcatcagcaccagatatgccgcaaatgcgatcaggattactatagtatctgtgttactcattcctttttctcatccttcctttatgtaattataataccgaattgttccgtacttcgtactttcacagtccgtaaaaatatttgtaatccattatccctaaaacttcttgtcttgtcaatcatttttgctttatttttttatcatattaccatattaaagcgtattgtataaaaaacacccgcatacggatgtattttctccgtatccgggtatctttttcctttattttgctgcgattgcttcgatctcgatcagaccgcccttcggaagtcttgcaacttccacacaggaacgagccggtgcagactccttgaagtattctgcgtagatggcattgaccgttgcaaagtcatccatattatccagaaataccatagtacgaacaacgtcttcatatccaacgcctgctgcttccagaacagctcccagatttttcagtgcctgatgggtctgtgcctcgatgccttccggcagagttccgttctccggatccagtcccagctggccggaagtgaacaccatatttccagcttctacagcatgtacataaggtcctactgctgcaggtgctttttcagcaaaaattgtttttctcatgtttgtatcctccattcaaatattctgcatttgcatcttattataacatgctgtgttcgttcgtcaagcatcggaaacgacttcatcttgctcttttttgcacaatagaatataataaacttaccaaatatttatgcaaaaaaacgaagggggaacgaaatgaaacacgaaaaagactggtataaagatctggtgatctatcagatttatccaagaagttttaaagacggcaaccatgacggaatcggagatctgaaaggaatgattgaaaaacttgattatctgcaggaacttggcatcaatgcggtatggatgtcaccggtgttcgcttcaccaaatgtggataatggatatgacatttccgattatacctccatcatggaagaattcggaaccatggaggactgggatgctttccgggacggggcccatgcgcgggggattgcaattatcatggatctggtgttgaatcactcttctgacagacatatctggtttcaggaatccagaaaatcccgcaacaacccctacagtgattattatatctggagagatcctgctcctgatggtggtgcaccgaatggctggatgtctgtgtttggcggcagtgcctgggaatatgtagcggagcgtggacagtattatctgcatttcttcgcaaaagaacagcctgatctcaactgggacaatccggagacaaaagaaaaaatctttgatattatccgcttctggaacgataaaggcgtggatggctaccgcatcgatgccatcagttatctggacaaaggactggatggccgtgccaatccaaacgaacagtttggtactgtcgcctgtgtgaacctggaaggaacacatcgttatatccgggaaatggttgcaaaaaccatgacacccgaccatctgatgagtgtcggagaggttaatattaataacgatcaggatgctatccattactcgagtgctgccagtgaagaatttaacatggcaattccttttgtaccgccgatcgtggagattcagacctggtcaccggaaaaaatgaaacgggatcttcgtcacgattatgaactgctgaaaaaagacggctggtgggcacgatttttaagtaatcacgacaagccacgccaggtttccctctacggaaatgatacaaccttccgggaagtctccgcaaaaatgctggcatcctacctccatacgctcccgggaactccttttgtctttcagggggaggaacttggtatgaccaatgttgcttatccttccattgaagattatgacgatattgataccaaaaatgcctaccataccatgctggaacaggggattgctcccgaaaaggcactggcagaagctcaacgaatcagtcgcgataacgcacggacaccgatgcagtgggatgacagtttaaatggtggattttccgatcatacaccatggctcggtgtcaatcccaactataaagaaatcaacgcagccagtcagatggcaaatgattcttctgtctttcgtttttatcagaaactaatctctctgcggaaagaacaccctgtcatggcacacggtgatctgcagctttgctgcccggaggacggaccggtgattgcatatacaagaagttatcaggatgaaacctggctcgctgtacataatttttcgcaggatgtgcagaaattccagtacaccggaaccggtctgcagctggatacttcagtacttttatctaattatccggaacatgatatttgcccggaagatgatattttaacactgaagccatacgaaactgtgatcttccggttatcgtaagacagcattgtgtcaaccgccacacatgcatagcagaaaagtctgaaacatcagcttgtttctcttgtttttctgacattgaccgattaaaatagatatatcaggtgcatacaactaaacattgcaccttttagaaggagggtttttcttatgaaactgcaaaattattttcaggatccttcctctttacacatcggaacagaaccgcttcgtgcctactatgttccatgtagagaagaagcagaagccaacggcgcagacatgctgaaggcttcccgggcaatcattttaaatggggacgactggaaatttaaattctatgaaagctatcaccaggttcctgaaggatgcactgaaaaagctgcggataccacaggctatgataccatcccggttccaagctgctggcagatccttggatacgatcagaatcagtataccaatgtccgctatccgattcctttcgatccgccttatgtgccggatgacaacccggcaggtgtctatgtgaaagaattttcactgactgaagaagaagcgacgcagaaaatttatctgaactttgacggcgtggactcctgctattatgtatggatcaatggagctttcgtcggctacagtcagatttcccattccggaagtgaatttgatattactgacaaagtaaccgccggcaataaccgcctgactgtcctggttttaaaatggtgtgacggaacctatctggaagatcaggataaacttcgttttaccggtatcttccgcgacgtttacctgctggttcgtccggtggatcatatccgtgattattttgtccatacaccggtaagcgaggatcttaccaaagctgagattctggtcaatctggaactttatggttctccttccgtcactgtaaagctgtatgcaccagacggagatttcctggctgctgccactccttctgacggaaaagtgcggtttgccgtagatgatccggatctgtggaatgcagaacatccggcactgtatacgctgattctttccacaccggatgaagtgatcgctcagaaagtcggccttcgccggatcgatatcaaaggaaatgtcatctatatcaacggtgtgaacttcaagatcaaaggtaccaaccgccacgacagcaatccgtttaccggagctgcagtcacaagggaacagcttctgactgatctgaagctgatgaaggaacataacatcaatgcgatccgtaccagccattatccaaatgctccatgggccacacagatgtatgacaaatacggtttttatgttatggatgaagcagatctggaatcccacggatgtaccacactctacggaagtaagagtgaacatgtcgatatgggagaagtacagtacgaagaaagctatggctatctgatgcgcgatccttcttatgaaaacgctgtcgtagaccgtatccaacacctggttcacagagacaaaaactgctccagcgtcttctcctggtccatgggaaatgaaagtgcatacggtcctaatctggaaaaagccgccgcatggatcaaatcttacgacccggatcgtgttctgaactatgagaacagtatctggcagcagaccaatactgattatgtcaacgatgtacatgatctggatgtcttctcccggatgtatgcaccggtggaatttatcgatgagttctgctctaaagaaggtaaaaaaccatttatcgaagtagaatactgccacgctatgggtaacggacctggagatctggaggcttattttgaacgtctctacaagtatcccggttatatcggtggtttcgtatgggaatggtgtgaccactccgtctatatgggtaagaccatcgaaggcaaagataaattcttctacggcggtgactggaacgaggaaatacatgacggaaacttctgtatggatggtctggtatacccggatcgtaccccacataccggtcttctggaacataaaaatatagcccgtccaatccgtgccactctgctggatacttccaaaggactggtcgaactggataacaaactggattataccaatatcaaggatggatttacaatcacttacgatgtacaaaaagacggtatgactgttctttccggtacactggatccggtagactgcccggcaaaagaaaaagtaacgattacattaccatttgctgtaactgtagaagccaataccatcgttaccctgcattatctgcaaaaagaagatgctctgctgaccccgtcaggatatgaagccggtcatgatcagctgatcttttctaccgatgccacaagtgctgtcgccgccgttgccaaagcttccggtgcttcgaccgcatctgctgcatctgctgtatctgtagaagatctggaaaacgaactggtagtcagcggctctgctttccgttacgtctataacaagtggaaaggaactttcactgctcttgtaaaagatcagaaaaacctgattgctcagccgatccagttaaatatctggcgtgcaccgatggataatgaccgccggatccgctgggaatgggaagctgcaggctacgacagagcacgcacaaaagtttatgctactgaatggacacaggatgaagacggtgtaacgatcacttccacctattctctggcagctgtatatctgcagaggatcatcgagggaactattacatggaaagttgcaaaagacggtactctgaccgttaccgtagacggtgagcgaaaaccggttcacgtaccgcttgcaaaaactccgctgccaaagatgccgttcctgcctcgtttcggtctgcgcctgtttctggaaccggcctttgccgatgttacttatttcggttatggaccgatcgaaagttatccggacaaacatcacgatgcaaaacttgggctttatacctctgatgtagacagtctccatgaagattatctgcgtccgcaagaaaacggaagccactggaactgctccggactggcactgaccacttccgatcatcgttctctgctgatatccggcacacagaacttcagttttaatgcatcccggtacacacaggaggaactgactacaaaagcacacagcttcgaactggaaaaatctccgtacacagtgctgtgcctggatggatatatgtccggttgtggctctaacagctgtggtcctgctctggcaaaaaaatatcgggtagatcaggacaaactgacatttacctttactctgaatttctaagacttttatactactgatcaattcctgatctgactcacaccgggtcacgagacgtgtaagcacggactccgacccggtgtttttttcgtgaccgaacattcaaaaaggtcagcctttcataaccttacccaataaaaggtatgattcttacaccttgaccaaatctggtttttccgttaaactaaaaggcagacataatggtaatgatcaaaaaagaaacagtccgaaaggactgaaacagtatagtaaggaattggtgaaaaggaatgaaacagacactacagcaaccacacatacatacctctgcaaacagcgagatagaaacttgtgacatctgccaccatcatcatctgcatcttccgatggaagcaccggctgatgagacattataccgtctggcagacctctacaaagtgttcggggatcctaccagaatccgcattctatatgcattatccggtggtgaactttgcgtctgcgacatcgcagaacttctgggtatgacacagagtgccatctcccatcagttacgtgtgttaaagcagtcggcgctggtcaaattccgaagagatgggaaaaccgtatattactctctggctgacacgcatgtggcaactattctcgcacagggactggatcatgtacaggaataaacatgaactttaaatcaagattggtccaccggactaattatggatataccaaaaagagagaagacagaactccataaaagttccatcttctctctttttggtatatccataacattttttctatttctgatgatatccatccagaaattctcccagtttctttgtcgccttctcaagatctgcaattctcggcagatataccacacgaaaatgatccggctgtccccagttgaaaccgccaccatgcacgatcaggattctcttttctctcagcagatccagggcaaatttctcatcgtcgtagatattgaatttttccacatccagtttcgggaaaatgtagaatgctgctttcggtttcttcgctgatacacccgggatatcgtttaacaatttatagatgacttctctctgttcatagattcttccacccggctgcagatactcttccacactctgatagccaccaagtgcggtctgaatgatcgactgagccggtacattggaacacagacgcatattggaaagcatcttgattccctcgatgtaacctgctgccgcttttttattaccgctcaataccatccaacccacacggaatcctgcgatcatatgagatttggacagaccgctgaacgtcacacagaatacatttttcggtgcaatcgatgcgatggaaatatgtttcagtccatccatcaccagacggtcataaatctcatctgagaaaatgatcagtccgaattcttctgccactttcacgatttcttccaggatctctttggaatacagcgcaccggtcggattgttcgggttgatgataacaatagcttttgtcttatctgtgatcttgcttctgatatccgcgatatccggattccagtcggactcttcatcacagatataatgtacgacttttccaccagccagtgtagctgttgcggtccacagcggataatccggtgccggaatcaggatctcatcaccatcatttaacagtgcctgcatgctcagattgatcagttcgctgacaccgttacctgtatagatatcgtccatcgtcacacccggaattttctttaactgacaatactgcatgattgcttttcttgcggaaaacagtcccttggaatctgaatatccctgacattcccacaatgactgtctcatatccagaataacttcttccggtgcattaaaaccaaatggagccggattaccgatattcagtttcagaatactgagaccatccgcttccattctggccgcctcgtccaccacgggtcctcttacatcgtataatacgttatccagtttggaagatttatcaaaagtcttcattgtatctgcctccattcgtttttattttcttttactttagcacactaattcagtgattatgtatcttttcaattgtagctcattaccttctttttgtcaaacccggaatccttatgatttatatgctatttcaggatttttttcagttcatccataaaggtattcacatctttaaactcccgatacacagaagcgaaacggacataggcaaccgcttccagatctttgagtttatccatcacgatttctccgatcacagagcttgggatctcccgctcttccagattaaacacctctgtttccacatcatctaccagccggtggatctgttctgctgataccggccgtttgtgacaggcacgaaggacaccggcctctatcttggatctgtcaaactgttccctgttctgatcttttttgatcacgatcaacggaatcgtctccactttctcataagtggtaaatcgctttccacacgcatcacacattcttcttctccggatggcagtgttgtcatccgccgggcgtgaatccacaacccgggtattatcctgattacaaaacggacacttcatatttcatccttctctttccgcaaactgcctctgattgtccggtattcttctgtatcctcttattttcccgttcaattatctcacagttttcttattttcctgtaactttcatcactcctgtattcctcacacagtggatgctttatcttttcccatcataatataatcgcaaacttaccgtcaagacaattaaccacaaaacatataattaatataaaagaagtataaaaatcaggttttttatgcgaattattgatctgaaacaaaaagaagtcatcaatacctgcaactgtaaaacccttggctgtcccgtggatgtggaatttgatccctgcagcggacggatttctgccatcatcatcccaggccccggaaaattctgctgttttcttggaagagacagcgaattctgtatcccctgggaatgcatctgtcagatcggggaagatattattcttgtggaaatcgatgagaaaaaatgcctgaagaaactgtgactgctttcctggcagtcatcagaatgttcttcaggcccgctccctgatccattggctgtttctctcatcttctgttatctgtatcgatatccagcaacaacagattttcttcttttacatacaatttttccggcacaccctccgacggatcccagtccgttttcgctgttttccattgcagccactcgcaggatctgtcttttcggaaggaaacattccattcaaagggatcttccataattcggtattctcccaccgggaactcactgtaacatccttccgacggtttttcctttgtaaaaaagtgggcgcggatcccgatggtccgtgcctgtaaagcttctttcgatacccggatgccaactccccagtccgatgtccacaaccagtttccatctctgtggctttccatagcttccaccgcgcagatattcttacatcctgataaaagtgccgccgtcttcgtcttcggattccggaaaaattcttttaccggttcgatcacttccatccgcccctgatgaatacagctgaccgtatcacacagtcgatagacttcatcccggctgtgagatacaaacagtaccggtgtctgtactttttgtaaaagttccagcatctgttgttccattttccatttcagatagctgtccaatgcggcaaacggttcatccagaagcaatacttccggctctgctgccagcatacgtgccatggctacccgttgtttttgtccaccggagagctgatccggcatatgatgttccagtccgccaagctgaaatcctgtaatatattccctgacttttttcggatccggctttctccccatccctgcctgaatattctgtaccacattcattgtaggaaacaatgcgtaatcctgaaacatatatccgacttttcgtttctgcggtggcagattaatccgttttgccgaatcaaagagtaccctgtcattcaaaacgattcttccctcatccggccgttcgatacctgcaatacattttaacgtcatactttttccgcatccggaagctcccagaatggcaaatatgcctccatccatggaaaaatccacatccagcagaaaattccccagtttcttttttatccttacctgcagcatatccgccctccttaccaccgttttttatgtttattatcaccggatccgagcaggttcatcaccagcaccacaaaaaaagcaatcagcatgatcacaacgacccagaaacctgctgtcccatagtcgccatcctggataaccatggcgatcttctgagagatcgtccctgtctttcccgggatatttcccgccagcatggaagttgccccatactcacccatagccctggcaaatgtcagaatcgttcctgaaagaatacccggtccggcggatggaatcactactttccagaaaatctttatttccgacataccaagcgttcttgctgcataaaccaggttggcatccacctgttcaaaagcagctctggcattccggtacatcagtggaaaagcaattaccgttgccgccagaatacagccaagccaggtctgtaccaccttgattccaaaatttccatacaacgcagcaccaaacggccgccgcacactgaagatcagaagcaggaaaaatccggcaactgtgggaggaagtaccatcggaagggtcagaatcccgtccatcaccgcttttgtcttcggacctgcttttaccacctgtcttgccgcatagattcctccaaaaaaagaaagaatggtagccaccactccagtctttaatgagatcagcagaggactccagtccagccccttcataaattccatcatctgttccattcgtgtctccattctaatctttcccacgccggaacatcctgttgcggcggaaaatatgtatttttattatattatttcaaaaaatctgatcagttctctacatctgtatcaaagtagtatttccggaaaatgatctttgcatcatcggtgatcagaaaatctacaaattctttggctgctgtggattccagttcttctgcttcaggattctgtacctgtgccaccggatagataacatcaccggtcagatcatacggaatgacctgcaagatctccagacgatcctccagtccatacgtatcggaatagtataccgttcctacctcattggatccttctgctactgcggaagtaactgcacccacattggcacactcattgatctccacaccgcccagtgcttcagaaacagcagctgtcggaatagtggatacatcgtcagctttttccagaattcctgcatttaccagtgcctgacgggtgtattttccaaccggcaccgaaccatctgccagtgcgatactgctggctttgtccagatcctccaggctggttacttcggtgttactttctttataagttaccaggcacacctggttatttactacattatggcgggttccgtccacaaccagaccatctgtctcatccagctgatccatctgttttatcgctgcagagaaaaatacatcgcaggctgcaccttcttcaatctgtgtcagcagcgttcctgaactgtcatagcttccctgtacatttacatttggatgggtctcctgaaactttgtaatcagttcttccattacctgattcagactcttggcagcaaatactgtaatagtagtttcttcgcctgcattgtttgctgttgtatcattgctttcgtcaactgctgcttctgcagttgcttctgtctttgtctcttcttttgttgtatccgccgcactgttgttcttagatccgcatcctgtaagcagagacactaccatagctgttgcaagtaacatacttacactttttttcttcattcattctttctcctcattcctgttttgtctgcgcggacctgtatcagctgtgctgcgatgctgattgcgatctctgccggtgtttcacttccgatttcgattccgataggtgcatacacctgatccagttcttcctctgtgaagccttcgcttgccaatttttctctgacataccgggtttttcttttacttcccactacacctatataagaagcaggtgtccgcaaggcaaaccgttccacatcggcatcacagcgatgccctctcgtgactaccaccagatagtcttccggttttactgccagaatctgcgaaagtgctgtaaagtctacggtctttgtctcctgaactcccggaaacaaagcgtgatctgtatattcttcccgatcatccaggaccatacaccagaatcccagatgactgagcaccggaaccagctcctgagccagatgaccacctccaaaaatgtaaacccttccatcgtaacagaattcttctgcgtaaatcttctgtccgttttcctccagaatcctgcagtgtcctcttccttctgtgatctcgcttcggatccggggcgttccttcagaaaatggaagaaccagccagtaaggttttccctcatctgctgccgccagtgcttcttttaaaaattctccgacgcccggatcctgtgcgcaggcactgtaaaacagtacttttactctgcctccacagaccatgcccagttcgctgttttctccggttcccagatcaaaattttccacataatgggcagctgttcctgccagttccatggctttttttactgcctgatattccaagttgccgcctccgatagttccgtagattcttccgtttttagcgactaccatataagcccctgtagttcgcggaacagaaccatttccttctacaatagtaaccagaaccgtatctgtcttctgattccatcgatccagtaacaactgatataattttttcattgattgtgtttccttttatgtgaattttctgctattctattctttccaataggtcaccttttcggatcgtaccaccatgtaacacaatggcaaatacaccttctctgggcatgatgcattcacccatccgtttataaatctcacagtggctgtgacattctttcccgatctgggtcatctccagaacggcttctccacattgaaaacgggttcccaccgcaaggttgcgaaaatcatatccgctgacgatcaggttttccccaaaggcaccaagttcgatatcagcaccctttttccgaaattcttcgattttttcataagataacaggctgacctgtctgtgccagtgtcccgcatgagcgtctccctgaatcccccagtcctttgccagaatggcctcttcgatttcatgtttcgctgtaccacgtttttcactgatacagattcctttaattactcccaaagctgttcctttctattgtgtctactctatccaccaatttttaccatttcatgtgtctctgtcatctcggccggatgttcaaagcagtgtgccgccggttttcggaaaatcgtctgctccatgattgttcgcagattttccttctctccttcgcggagcacccggcgaagatcctccccctcatcatagcacagacacagtttcagatacccttctgccgtcagtcggacccggttacaggtatcgcagaattttccgtgtatggcactgataaacccaaccggaactttcagatctgaaaactgataatacaccgccggcccactgcccatccgggaaagttcttcccgattggtcatacattctgcttttccacagactgcctccagtgtctcccgcagttcttcattgcttctccccacgtattttttgccatatccgactggcatcatttcaataaaacgaaggggcaggttttcttcctgtgcataacgcaccagtggaatcggatccagttcttttctattcactgcattcagctttactggtaatccggcagtcttcgccgctcggattcctgccaggacttcctgcagttcccgttttccggtaatcttatagaattcttccggattcagtgtgtccaggctgatattcacgccgtccacaccgacttcttttaactgtttcccataatttccaagcaaaacaccattggtcgtcatagtgatagtctctaccccggaaatctccctgattccacggatcagatccacacagtcttttcgcaccagcggttccccgcccgtaatacggatgtgcgtgataccaaggcttacgcctgttctcacgatctcccagatttcctcaaaagtcaggatgtttttcattcctacatcctgaacgccttccggcatacagtagcagcatcgcagattgcaacgatccgtaacggatatacgcagataattgatcactcttccataccgatccagcatcttcctgttaccatccttttccaaaaccacagtttgggtaagtacagaccgaacagttcaggcacagaccgccctctcccaacgctgccagttcctctgctgtgatctcatcatctgccagcagacggggcagtgccagatcaaaaatcgtccgttttgcatacatcacacaccccggaagtcctacgatcgggatctcttcccggtaataagacaacaggaacatggctcccggaagtaccggtgcaccataagaaaccatccgcgcccctgtgttttttatggccagaggtgttttgtcatccggatccacactcataccgccggtacaaagtaccagctcagccccctgttcgattgcctgcagacagcctttggtgattgcttcatgatcatcatcatatacttcatgaaagatcatttcacagttatattctttcagtttttcaaccagtaccggagtaaatttgtcctcgattcttccatggtatacttcacttcccgttgtcagaatcgccacttttttcccgtgcagcggtttcaatgtcagaatcggaccatcctgacagactgctttcgcccgctccatcttctctttttctataaccagcggaataattctggttcctgcaagcttatctccttctttgacgcaggtattgccgtgacgggttgcaatcatcatttctccaagcccgttgacttttttaagtttttccctgtctattttcaacagtccgtcacagtcagcgatcacctcaattttcccttctttgacctctgaaggatgcatatgctcatttctgcacattgcatacagaatctgtgccgcctcattttcatgaagcatatgctcatctttttcccagatataaatatgttcttttccaacactcaaaagtaccggtatatcctcctcggtaatgatatgacctttccggaatactgcatctttcgtcaccccgggaatgatctgtgtgatatcatgacacagaacctgcccgatcgcgtcttcagtcttcattaatttcatgcgtgttctcctctacctactccactgcttcacagattacttcaagcacgcttcctgcgatacagcgggctttgtctgaaatcgtaaaacagtttgccaattcttcttttctcggatcaatatctgcgatcttaaatccctttgtcaccggataatcatcgcggatcagaccacggagaagtccgtcaatggttgctgatacctctgtcgatccgtcttctccctctatcacagccagaacctgcccggcttccacgatatctccgattttacttctgtttttcattcttcctgctgccggtgcatgaatgacacgttctgcaccgtagccgccgatgactcccggaatcccggtgttcggatatgcacttccctgacggataatccttccaagattatgcccacgtttcgtctcgatcaccacatccacatcttcacccgcacagaatccaggaccaagtccgatcgtaagcggtgccatatcttttgttgttccgagatttttctttgcaaggattgcatccaccacaaccttcggtttcagtaaccggatactttctcccttcggatccaccagaaccggaacttttccttcctcccagacctgacgcatctgctccacgctttcgatccggacagcctctacattctccacacaggtgcttccactgtacacagcttcactcagtgccacctgtcttcggatcgctgccgggtgatctgtttccagaaccagcagatgaaatccgctttttttcagtcgatgaatcgtcccggtcgccagatcccccgctccccggacaatgatcagatcactctttttcatccgtaattcctttctctttcgttattctcgttcgagaataacgcttacatacttataactttacaatacttatatttatttgtcaattctgtacgcttttttgactctctttttcccatatgagttactgggcacttcgttcccggtaacacgtttcgcatagtatcccatatatattccggcgcatgctttctctgtctatgcttcaaaccatctcataaaaaattcttcggcgctccgattcagttcctccataaacatttcatatcgatgcagaaaatcctttcctttctcggtaagcatggtcctgccgcctctgcttccgccccggcttccttccatcagaggaaaccccagatcttcttccgcgtgcttcataatacgccatcccttggaatacgccatccccatgcaccgacaggcctcggagagcgaccctgtctcttccacatggtgcatcaactccgccactcccggaccaaaagctccttcttttcgaaacacccgcaccttcatatgataatgcagcttattttcttccatttttctccttgtccaccatacattcctgtattttcctgaattattaaatttataccagccgttcagcagtcactgtcctgcgaggtgaaggaaccgaacagctgccgttcaggtttttctacaattccagtatatactccccttcccagtgacagcctgctttctccagtgccgtaagaatctcgtctcttgcctccggcactgccttccaggaaaggccacaacctgctgtaatttcccttggaatcgggatcagacgtcccggcaggttctgttccatggcatatttttctgctgccatcgcctgcgtcgtactctcgaaagtcaaaatccatgttttctttttcattctcatattcctgacaactcccacaaagcctctgccgttcgatccacttctttctccgtattccagtgtgacacagagattctcacagccccctgttcttttgttcccagcgtctggtgcatcagcggagcgcaatgcgcccccgcccggacagcaattccatgtttctcatacaaccagtccgcaacatacgcagaatcttcttctcctatattaaaagaaagaattcccacacgccggtttccgtccggatcaccataaatacgaatcccgggaatctccctgatctgttcttccagccttcttaacaattgccgctcccgctgcaaaatctcctttgttccttttttcttcagataatccagcgcaccaccaagtccagcgattccatggacattcatagttccggcttccagatgctccggcatcgctttcggatgttcccggtcaaagctgtggataccgcttcctcctaccttcaacggacaaatctccactcccggacgcacataaagtccaccggttccctggggtcccaaaagtcccttatgcccggtaaagcaaaagatatctattccctgtttctgtacatccaccggtaaaattcccgccgtctgcgacccgtctaccaccaaaagcaaatctctgctctctgttacttcccggatcctttccaggtcggtaatatttccggtcagattggaagcatgtgtaattacgataccttttgtattctccctgacaagctccggaagtttttcatactccaacacaccattttcatctgcggaaagaaaactgacttccacaccttcctcctgcaaccggtaaagaggccgaagaaccgaattatgttcgcagactgtggtgatcacatgatcccccttatgaaacagccccaaaatcgcagtgttcagtgcctctgtagcgttcgaggtaaatgcgatccgctctcctttttctgcatgaaaaagttctgccagctgctctcttacctgatagacacaccgtcccgcctgcaacgtggcctcatgtgcgccccgtccgggattccccatggtatgaaaggcacgaatcacagcttcttccacctctttcggcttttgcagcgatgttgccgcgttatccagatatatcatggcttgatgatctggtcggcttttgtcatccgctctgcgatatcatacatattggtaacttctcccacctgtaatttatcggatattccataaaagttcagacaggtaccacaggtacgaatctccacgccctgttcttccagcattttcagatcttccaaagactgagaaccttcacaggtcaggaatgctcccccattataaaagagcatctgatccggcagctcgtcctgctgtgtcagcgcgtaaataaatcccttcaacaacgtagcacccagttcgtcatttccctcacccatcgttttcgaagaaatcaccaccagccgattcttcttcgccggtgcacatactacataatctgcttcttccactgatgtctcctgcgttgcttctgcctcgccaaccgtcagcgtcacctggtattcctgttctttcactttccgtgaactacagccataacctttctggtttgccatcttggtcaggttctgcacagcaatctcattatctaccagcacctccaccgttccggcaccctgcagttctttgatggcttcctttgctttcactaacgggatcgggcagatatctccgagtgcatttactgtttttttcattttgggttcctcctgtttaaaaaataatatgaactgttttatcagaaacaagttgagcaaacaatttgttatctactaattctgtaaccaatatagtcgcatgatcgtcctgttctttgctataagtgattttgcgtacatcttttctataatcatcaagattatttatactgattttcccttctctcacaagctggcataatatagcatcattactcttatatgaaaccggcacaggcattctcattgcaaatatctttcttaaatctgcttccgcttttctttgaaaatcatatgtatcactatcttgagaatatatagttagtgcctttgtttcaggataataccacgatacaatctccaccagaatcgtaattgatacttcaccggcatttttcttttttactctgccggtagataatatttcttctgaaatcggccattcatcatataatttattcacccagtccttatatgcatccatatcgagtggatctgttttttcaacatatcgccgtaaatagcttctgattcttgccagctgacgtgtcgaagcaagaacaatctgatacaggttgccttcttcactatttgccaaatctgaatatgcttcctcttctatacagtatatcgggtatccctgttttatcaagtcttgcacataacgaattcttcccagagcatcgtttatttccgtcaatacccattcaggaatcaaaatcagatcataatctttcagtacagattctgacggtataccttgcctatgcagtccttgcataaaagatatggaagatgtatccagaagagcgatatgccttttaccatctatttttgtgattttttctatttctatcattcgctcctcctcgttatcatatttatttcatccatgatattcttcaaatactcttcattatccttgtgataatgaagttccggattttcatttattgtcctctttattctttcctttaaagaagatgtattgataacataagaaggagttaccagactatcatctaatcccagcattctgaatctgtttggtaaatcatcaaattgcagatcaaatacttctttgattctgttacaaagcttttcgttttcactttgaacaccatattcatataatgatattaatacagatttatatggtgtctggaatgtcgacatacaataaaaaattttcgaaataaactctatttccggaagttccataaaatatctttcgacgccatttaaaagcatacacgccgcaaaatactctgcctttctttcctccagtgtattgtccgtttcgataaaatgatcaaacgatactttgtcaaatatcaaatgataaatctcatgccaagctgtgaaatattgatttgctcttggaagagaagtgtttgtaacaggaataacttttccatccttaacaaatatcgctccgctccaaaacttgtcctctataggcatctgaatcaatccaaatccctgcaaaatcaataacgcaagctgaggagctgacgcaactttcattattgatgaatttatctgaagtctcattgcctgtgcgaatacttcttctttaatctcaagattcttttttacaacaagttccagattttgagcagtaattaattcactcatctgatctacctctccatttcatcagattgtctacctctttaataataaattgcacacaaatcaataatatcaagaagcaaatcgtactgtttctttgctgtatcgctcatttcatgatccatcggtgcattttgagaatagacggttgctgtggcaggttttggcggaagcgaatgatacaacatcaactcttccactgtcatattaagtaattgcaatattttttgcaaatgacgatcaaaggaactcttattggatatactgccattcaacaacttgtcaagtgttggtcgtgaaatacccgcttttgctgcaaaagatacctttgtatatcccatatccctgatacaatcttttaacttcgaagccaccagacttctgtgttcaaataattcatcaaacttcattgtgatgacctcctttgctctttcttactctgattatattcagaaaaataggatttatcaatagtgttgtaaaatttttttttacattttgatattgagtccacatcttctattttgcaattttgcacactctctattccgatagccttcaataatttttcagcaaaatagctataagactccttttctgaaatcttatagcttttctattgataatattaagatttatttctaattgtcaattatttcccaatgtccatctgtactgattttattatccttctttatcatattcaatattgggatttccaacggattcgtctcttttttctgagggacatctcgggggacattccgagggacattctaagggacattataattcaaatttggcatacctcacttaattatatatttcgtacctcttcccttcccttcaactgcaaccacacctttttctcccatagttttcagtaactgtgttgtttttgatttaccaaatggaacatatggtgcaatttcacttattggtttcaacatcgtcttacttaagaatttgtaaattactttttcatcttcggtcaaattaacattcgtttcaaatatcggtaacacaatttttatcgcattttctgacacttcaaaatctggttttcgcagactttctgcatacagttgttttattcgtataattcctgttccaaatatctctacaagtctcaatcgataaaatacatttgcaagatttctattccttaaaacagaaagtttacccgataaatattcttctgctgttattccaaccggcaatccccccggagatacaatttctattctatcatcaaacagggaaactctgatgtgtgaatcaatatcccataccctgtgaatcaaagcatttgcaattgcctctctgaaaactgcttccggtattttctcgattatctttctttcaacaccctttattacttcatattgataataatctctaaatacagtaagtgccttttcatatgcatctaaaacggatatattttcaaaggtctctcttttttgaataatactgatattctcaccgaacttcacaatatcaattcccggaaaatgatttttatctgccaaaagtcctgctgcattattaaaaccctttacattgtcatacaggttcaatgtctttaacgtatccagattgaacgtttcaatctgaatattttctttcaattttcgatgtaaaatttcaaaagacagtttctggtctttacagggtaattcttcaaaactgatattttttccttctaatacaagtcttgaaaattccagcgtatctacctctattgttgctgtatcatttcgtttgtatgcttttgctttgtataaatacggcttctgaagaccaccttttacagtgagttttatcgtctggtcatcattctgtatctcaagtgtatagtttggctgaggtgatatactgtcattgattttattttcgatatccagacaagcctgctttacatctgacaatcctttcacgtttccatcatcatcaactccaaaaagaattgttccaccgttataatttgaaaaggcactgactgttttcaaaaaagtattcgtaattgtttccttgaattccagtattcttgtttcacgcataataatcgattcctttccaactttaatggttatattatatgcagaaatacgcaaaaaatcaatcataaaaatttacgattgattttttgattggttttacaaaaaacatctcagacaagtctgaaattttttattatcagctcacccttgtataggaataagttaactctcattcacttcctgctaattttcctcagataatacacacgttgtccattttttcttatagaaaaactacccaactaggctatctcttaaatcatgttcaaaatcagaaatcagccccaatgggtaggattttatgttcaaatatttaattcattttattttcataatcttgcaattcatgaaaaatattatccacataaactatatcgttttcaatacgatatagcataaaatatcgatgagataagaaattaattctacggtatcccagctttctcagtttaggattatcacaaagtttcaggctcccggcaacatttgacagactcgttttcgttgcatcaaaatcatttaataaatttctcgcagactgctcacttttcttttcaaacaaaagatatgtgatgaatctatcaagatcctcctctgcatccctcatcaaaacgatcttataatccatatttcgtcctcatatcagaaatcacaaaatctgcatccctgaaccttccctgttctctggactttgccaattttgcaagcatttctttctccgtcatcggtgcatatggatttgattctgcctgtctttttatttcaaaaggaaatccatttgtagcaacagcctgtgttaaaaacattctgattgccgttgttgtatctgtacccaaatccttaaatagtgcatctgattttctcttcagttcgtcttctactctaacctgaattgtactagccatgttcagcacctcatttccatatattttctttattataatgctaaatcatttctatttcaatgcatttgcattgtttttgcaaaagtacaccgtgtttttcaacataaaatactgattttactgcatttccatagtcctacaatgatacacgaaatataccgttatcataaatcctaactttttctctcatcccaacaaatttcttctatccggtctcacatcctcatcatcccggaagaaaaactcactgtaatcatctgtatcaaaaatttccagcagttctctcatattccagatcaaattagcctgtagcacctcttttcggtcgagccagaagactcttccttcttcggatgattttaattcgccttcaaactcgttcgtcttatacaggagaacaagatatctcgtaccgtccttctcaatccagtcttttacaccgcacagtttcggatttcttatagtcaaaccggtctcttccctgatttcgcggattacggaatcccgtagagattcatctttctccacatgtccacccgggaaaatcagaccgcccgggtaggatgtgccgcgcttttcttccaccaggatgcgtgttccatcgcagatgagacacatattggttaattctatttgtgatttacgctccaaatttttatcctcctatgtcgaaacatgcaacctttattatagcaaaagaatgcctgttccgacgtagctttttaagtaaaatctcacacccgccacaaggaatcgcagatccacagactgctaagccctgcgctgtggcttccagtgtcatatctttatttacgcccttctacctgaatctccacttcctgtctctccatcacttccccgacaatctccgccggaagtccggcttcccgcagttctttgcgcagttcttccgccacctctcccggcactgcaaacagcagtccgccggaagtttgcggatcgtacaatacttcttccatcccgaacgatacattctcaaaccgcacatactgctccagatgattcctgtttttctgtcctgctgcggtcaggaggaattcttctgcgcatgattccgctccgtcaaataccgggagccggtctgcgtagattttgcaggaatgtctgccgtccatcatttcgtgcagatgcccaaggaatccaaatccggtgacatcggtgcaggcgtgtatcgggtattttcgtccgatctcagacgctttgcggttcagtgttgtcatggaagcaatcacctgctccatcgctccttttggtgcctggttgacacggttcgcggcgcagaggatgcctacgcccagtcgtttagtcagaatcaggcaatcgcccggttttgcgccgttgttttcccatattttttccggatctaccacaccggtcacggacagaccgtatttgacatcactgtctgcgatcgaatgaccgcctgcaaggcttccacccgcttcctgtactttttcagctccaccctgtaagatctttccgaggatattcagatccatggattccggaaaacaaacaatattcagtgctgtctttacttctcctcccatggcatagatgtcactcagggcattcgtcgccgctatttttccaaatatatacggatcctctaccatcggtggaaaaaaatccaatgtctgtaccactgcctggtgttcattcaggcgatatactgctgcatcatccttgctgtcatatcctaccagcaaattttcatctttttttcccttcggaagccgttccaggatgtgttccagcactccggctcccagttttgcggtacatccaccgcttttgcagaatacaatttctttttcgctcatttttcctcctacttccgtgcacattccccatcttctcccagaagaatatccagcccgtgtcccagtgaactcagtatgtaagtaagactctcctctactgccttcgggcttcccggaagattgacgatcagggtctgtttgcggatcgcactggctgcgcggcttaacattgctctcggtgtgatcgtcaggctgtatgcccgaatcgcctctgcaatccccggtgctatccggtcagctacagcgagcgtagcttccggcgtcacatcccgcacggaaaatcccgtaccaccggttgtcagaaccaacgcacaatgctcctcatctgccagtctgcaaagttctttttcaatagctgcctgctcgtccggaagcatccgataagataccacttcatactgatcgtccggaagtaattcctgaatcttcggaccacttagatcttcccgttctccacgggagcctttatcgctcagcgtaacaattcccactttatattttcgtttttccattctgttcacctgttactattccctttccctttttttcatgtgttctgttcatttatttttttctgacgtaacgtaatctttttcattttttcttatatgttatccattttcgtttctgtaatgtccgctctttccgcccatcttttccaccagatgaatctcggaaatcaccatgccgcgatccatcgccttacacatatcgtagattgtcagaagagccacgctgactcccgtcatagcttccatctccacaccggtttttcccacacaggatgtccggcaggttgccgtgatctgacgggttttctcatcgagtacaaattcaatctcacagtctgtcagtgcaataatatggcacaacggaatcaactccgcgttctttttcgcccccatgattccggcgattctcgcgataccgagaacatcccccttttttgccgtgtgatttgtgattgcctgaaaaacctcctcgttgaccgtaatcgtcccctgcgccaccgctacccggtaagtgtctgccttttcatgcacatccaccatcacggcatttcctttttcatcaaaatgtgtaaatccactcatgatattctcctttgtttacccctgtcaattctaataatcagacgtcttttgtatgaagtgaagttcctgacatctgcttttcagggcttctattatatctttaattttaataattaatttctgaattttctactgtctcaaacagtctttctcataataaagaatcagtaatacctgctaagtaacaagtaacatgctttcattttcagcataatttgaatcaattgtaattttcaaatctatactatactgccgccttaaaactttacagttgctccctcgctcgacagttacgtaattttgtcaaaaccacattctccacgccccatccacgcaacatttctccgatccgttctcctccctctctccgcgtatcatcgtcgcactgattcaacacagccacatattttctcccttcgacatctttccgaagcccttcctcagatgccagaatcttcgccatatcctcacagctcagcagatgatcctcatccgcctccaacagcttttccgcctcttccagccgaaaacaacattcctttaacggttgctccaacgccgaaagtcccagaactgcaatcacaacctctgtctccggcaaaatgaccggttcgtgcgtggcgggtactttacagggcagtcgttttgatccgtctgcttcgatcaggacgagatccgcaagtgccatcgcctgtctcatccagtcgggatccggcatttttagtttctgtggctgcttcacttccacctctccgatcaccgcccagtctcccgcgccccagatacgttccagatcttccggtgtccgtgccagtttttccggcttcggtcggaaaatatgcgtggtcgtcgttaccagtacctttttcccctgcttggttccccaggctgccataacttcgatcagcgaacttttcccgcctgcccctacaaaagaaaaacaatgtctatctttcgtaagagtcgaaaataacagatgcgactcgaccttttcactttgtttcttctccagattatatttgtaaaatttctgtatcaattctttttccatttttaccaacagaacgacagcttttcaaacttttcttccagttcactcctgctgcccttctcattgtaatcaacctccaaaaccagctttccttaagtttaccaaactcccccaaaaaagaaaagccactatcccctaccggagataatttctcatcacccgcagggcatttttctccagacggctgacctgtgcctgggaaatgccgatctcctgtgctacttccatctgcgtcttaccctcataaaaccgcaggttcacaatatgacgttctctgtcatttaaccggttcatcgcatcctgcaatgccagattttccacccagttttcttctttgtttttcttatcactcacctgatccatcacatacagggtatctccaccctcggtatacaccggttcgtacaggctcatcggactctggatcgcatccagggcataaacgatctcctctttttccatcccgatttccgatgcaatctccataatcgtcggttctcggagattgtttttcagataattttcccgggcatagatcgctttgtaagccgtgtcccgcagtgaccggctgacccggatcgtactgttgtcccgcaggtatctccggatttccccaataatcataggtaccgcatacgtggaaaatttcacctgcaaagtcgtatcaaagttatcaatcgccttcatcagcccgatgcagccgatctgaaacagatcatccgcattttcattgcttccggaaaatctcttgatcacgcttaacaccagtctgagatttcctttgatgtacagttctcttgcctctttgtcccctttttttatcttttcaaagagcaattctttttcctcattggtcagtaccggaagcctggatgtattcacgccgcagatctctaccttgttcaatgccataataagaatcctcctaattgtatttgtttttacaactaaaatgattctcagctggcaaactgtctattcatttccgacaaaaataaaaaaagttttactccttgacagttcttcttatttccgtcttttcgaaccgtaactttttgtgctatactgtttttattatgtttcagaaagatgaggaaatccactatggcagataacaaaacttcacatacagacgaaggtttacaggataacgaacagatcgaacaggcaattctggcattgcagcagcagccgtcccaggaaatgcttgcccacgcgctcaccgtactccgcagacggatgcttgctcacggacagctgatcgttgcagtcgaaccaccggttggcgacaaccagatgcgccttcaggcgatccagaccgatgacggtaaaaaatggtgggcagcctttaccagttttggcgaggaactaaaaggcggcggcagtgtgatgtctacctttctcacagatatcgaaaaattatttctctccgccctttcggtagaagaaatcgaaggagtgatcatcaatccttggaaccggacgctgatgcttgataaaaacctgatccgtatcgtccgcggatgagccaaaccgatttcttagattgattcattattatcattctatatgtaataaaacagcatatattttctatgcaaaaacctgatattgctatagtcatcaggttctcatgcaaatcttgacatttgctcgttgtacacataaaaataaaagagtttttgtctaataaacaaactgctccgtttattagacaaaaactcttttttatcttatccataaaaaacattgttcataacaaaaggggttaccgaaccatcgattttccaccacgctctgctaaattaatattccaccccagccagtgtcaccatcttcttcatacacatcttattaaacagcgcgatcacacgtcccacaccaagaaccgcaaccaccgttccgattcccacgccgatcagtttgtgagcaaacacgaggctcaccgtgatcgtgatacagatattgcacagatcaaagcagttttttgtaaatccaaccggttttcggatcgtatctgcgattgcctgtacgattccgtctcccggatttggcacgattcgcatatttaaggacattgccgctccgattcccgtcaggatgataccgcaaagtagtacaacaaatcgcatccccacttgttccggtgccgggatccaggaagaaaacagattcataaaacgggtaaataccagacttaatggcagctgtaaaaggtccatacccagaatcagcggcaatgatttcttcgttgacgcatccagcgcatgattttcttctctccgctgtcggtaattatggcaggtatgtaagagcagttcgatgataacaaacaccgtgtacagcccgaatgtcgtatttccaaagttcaggttccatatagtagaaatactgtaagccacagaaatgatcggcgaaacgccaagacctgatttggtattcagaatgatccccatcgccaggatcagaagcccgccggcatagaaaatccagcggaaagttgtactttttttcattttccattcacactctctttccggagaatattgtagcacacttcccgcatttttttcaaattcctatttttccacacaaaattccgcacaaaatcaacgttttcccacacatcaccggcaatccttatcctttatccaatgcgcaaaaattccctgcccggacaggcgttccattatcgccttatccggacagggaatctatatttacctatctatgtaactgctccgtcacacacccttatgcattcaggatctccagaactgcaccgaacagtgccgggctcaggttcatggttgccagtgttgcaacaccgtctttgcccatcttttctacgattgcctgaatatcagatttcaggttgtacggaatctgagctttatcaagcattgcatagcagcgtccggccagatcgttttctgccagagatataccgtctgcaaatgtgagcacgatctcttttcctactgctgtttccggtacttctacggtcagtgctgcaattgctttatcataggaaacttttacagctacttcttcgccgtctgcagttactttgcagcatgctttttccacacccatgaatactaccttccagcttctgctttccggaatcacagatacattgcccagtgctttgccgatggtgaaagtatcttcttctccgccggtaaatgtcagctgtgtagctacccagttttcttctttatctacaggtgtatctccctggtcttcccacagagtgaaggttccgtcttctgccgggaatacacgaacttccatagctttcgggttatcggtgctgctgtcataatcagccatatctttcatcggaacgatagctcctgctttcatcagaacaggcatatcttctacacctctccacagatcgatcatacggccaccctggtataccatacccgtgaagaaatcaacccacattccttccggcaaccaggttgttactttcgctgcacgcacttccggatcctgtttctctgtaatcggggacaccagcagttcagaaccaaagtaatattcgttcggtacctgataagcttcttcacgatccggctccagataatacattggctggatcagcggcagatcatcgtaatttgctctgcggttcatggtgtacagatatggaaccattccatgacgcagacgcaggtaatcttccataacaccctgtgtgatcttgtcaaatttccatggttcttttccgttgaacggattatcggtgctgtgcagacggttaatcggagagaatactccgtattctacccatcttgccatcagttcatcgtcacggatacccatcatatggccaccgatatcatggctccaccatccatatccaacgttgcttgctgtattggtaaaatatggctggaactgtaagctttcccatgagattacactgtcacctgagaatcctaccggatatctgtgacttcccacacctgcatatctggagaaagtcagcggacgattacccttccagctgctgtccagataatgataatggttcagcatccacagcggatccaatcccggcactttggtaacagttccctgctgccagtcaagccaccagaaatccacgccttcttcttccagcggatgatgcagatctttcaggtacacttccatgaaatgtggatctgcaggatcaaactgtactgcaatctcactttcaggatcgattcccatcttttctgccacgcgcggatacagttcctcatatgcacggattccgtcagccggatgcacattcagcgtaatcttcatattgtgctcatgcagccaggacataaatccttttggatccgggaagaaatttttgttccaggtatatcctgtccagccgcttccgtatttcggatctacatcatcaacaatatgccagtccatatcaacaacagctacagagaacggcagtttttcgtcttcaaaacgttctaccagttctttatattcctcctctgtgtaacgatgataacggctccaccagttaccaaatgcatatcttggcagcagcggctgttttccacacagataatagaaatctttcagactttccagataacgatgtccatatccgaagaaatacagatcctcgccatctccctgtctcggacttacccatccgtcttctgtcagtgccatcgaatgactgtcatccacaacagcaaagccttttcttgagatgataccatgctccattttgactttgccgctgtatttttcgttcatcggtgtgtcacccttcaaataagcatcatcactcagtttcatagcaccgtcgcatccgtccagtgtgcgggctgttccaagaagatcactcggttcatctccgtaattccagtttcttccccagccgctaccaccgcctacgactttgatagacagaccgtttgctgcaaatggttttctgttgtaatgaatctccagagaatctgtataaataaccagctcttcttcatcctcgacgaccttgaattccggtaccgggaaatcacggttcagtacggactgtgttgcacggtcctcgaatacaccttcgctgttgtattccagacgtaccagtgcagatgtcagcatcgtgattcgataacagtctccctgaataatcgcttcttttttgcttaccggatgtgcttccagcttatactcttccattcccatgtttgtaaaaacctcctttaattttttattttgtaactgtgagaatactgaataattatagtttaaaataaatatactataaaaatttggagaattcctctattaaactgacaaaaaagtatattattttgacttttttgtcttgccttttattgtaaggatgaagcgattttttcagccagtgcttccagggatgcttcctgtgcttcttttaccgcagaacggatcgttacaccttcctctaagagttcaatatttttcatactggcaaagatttcccgcatctgtcttccggcaaccggtgcccaggtcccgttttccatgatggctacagtacggttctgcaaactgtgtgctttcaattcagacagtacagtctccatcttggtaaagataccgccgttatagctcggtgcggcaaataccagatggctgcaacggaaagattcggatacgatcaccgaaggatctgtcacagatacatcgtacatggcgatattctttacacctttatctgccagttttgatgccaggatctcagcggcattttccgtattgccatagatggatgcataggcgatcataactgcctgatcctccggtttgtagctgctccaggtatcgtatttttcaataaaccatccgagattctctctccagaccggtccgtggagaggacagatcattttaatctccaaggtagctgcttttttcagaagattctgtacctgaacgccatattttcctacgatattaataaaatatcttctggcatcatccagccagtctctttcaaaattcacttcatccgcaaacaggtttccattgattgctccgaacgttccgaatccatctgcggaaaacaggatcttatcgacagtatcataggaaaccatagcttccggccagtgcaccatcggtgccatcacgaaggcaaaggtatgttttccggtacacagggtgtccatttcttttacaatcacagtacggtcttccaccgggaaattaaagaactgttttaacataggaactgttttcgcattacataccagttttacatccgggtatcttctcaccacatctccgatgaccgcgcagtgatccggttccatatggttgacgatcaggtaatccagtgtccttccattcagtacatattccagattttcaaaaaacaatccgctgatggatgcgtccacggtatctaacagaaccgttttttcgtccagcaggacataagagttataagaaactcctcttggaatcgggtatacattttcaaataaagccagtctgcggtcactaccgccgatccagtataaatcatccgttacttttttcacacaatgcatggtgcaactcctcactttcgcttttgtttttctatattatactgttttcagacatttctttcaagcaataaacatagtttaactgtaactattcagtagccactgtcccgcgaggtgttttgacatgaatatgtcaaaatcccgagacatacaagccaaaatgccatcaccgaaggtgatttacgcgagcaacgagtcaaagtccgtgcttgcacggaaccttgaggagtgccgcgataacgataaaaactcgcaaagcgtgtttttatcgtttaaatgcattttggctcgtaactgtgaaggtactgaacagttacgtttaactgtttattcatagcggacaatttctttttttaaccgcaccatgatccttttttccagtctggagatgtaggattgagatattccgagaagatctgccacttctttttgcgttttttcttttccatccggctgattcagcccgaagcgaagacagatgatcatcttttctctggcatttagcttgttaatagcttttaccagaagcttacactccacctcgtgctccagatctctgtagatcacatcttcgtctgttccgaggatatcagaaagcaacaactcattcccgtcccagtccacattcaacggttcatcgatggagacttccatgcgggttctgctgtttcttctcagatacatcaggatttcgttttcgatacagcgggacgcatacgttgcaagtttaatcttcttttccggattgaaggtgttgattgccttgatcagtccaatcgttccaatagatatcagatcttccattccaacaccggtgttatcaaacttctgtgcaatgtataccacaaggcgcagattgtgttcgatcagacttgccctcgcctgctggctgtcctcttttgtcagactctctatcactgcggattcctgctgaggagataacggattgggcagtacgtctgctccaccgatataatacacctctccgggttttctccacagcatgcgggaaaaacccggtaacatacgcatacgaaaatgactgggtaatactgcctgcatcatagaatttcctcctaactgtctatcagatttggatgtaagatcatctgacagtccccaaaagcagaactgtcttcccccgaaaaagcgaccaccggagcgtagatcactttctgtacgttttcattttccaggtacatggcatccagcgtgactgctaccagcagcccgcaagaacagccaagactggaataagccagaaaatgtggatgcatacgccgaaacgacaaagccggttctttttctgcctttcccctctgaaattcctgtaatttttccattgtatctgcatcacaaagcttttccagagttcctttttgaatgatgcttaccggtttttgtgcgatcggatcatacaggctgttccctgtatcaaaaaaggcatttacctctgtaatctgcccttccatctgcagtcttacccggcagcggatcctgcttttttttctccattcccgatatcgcggaagaacagcagcatacacaaggtaacagacggttcccgccagcaatacgtcttttgtcccggcaaatcccaggaatcgtttcaggacttccagcatacctcccatgaggaatcctgctatgtacagaccggcgattccaccgcagagccttccgggtgtccgcagtccacatccaaacctcaccatgattgtgttgattgccacatatgccagtaatgtattcaccggaaagctgacggggaaaagaatcagcatacaataactcaaagctccaaaagcagctcctccaagagaagccaatactcctgcccttcctccacacagtttttttaccagtcggagtaaataataatccatcaccagattggtaacaaacagttcatccggatagattgtataagacaaaaagcaccccctgttccatctggaatacttactggaaaacaagtattattatatggaacaggaagtgcttattttgtcaaaaatggggtgtcgaacgacagtttcgctcgacaccccattcctgatttttcgctttttcgaaattattatacatattcctttcggatcagcggtatattttcttgttttttattattatttgtagagaattactcttgtttcatatggctgcagaacacctgctacatggtttttgtagttagtgatcagttcttcgccttcttttccttcgaacagatcgcaaggtacttctttgtttgtaaagttacaagctaccaccagtttctcatcgcccagtgttctctcgtatgcatagatatcatcgttgtcttccagcagtccgtggaatacaccttctacgataatctcattctcatgacgcagccggatcagtttctgatagtagtagaatacactgtctttgtcttccagggcagcctttgcgttgatctgtgtatagtttttgttcacactgatccatggcgttcctgtggtaaacccagcatttgcgctgtcatcccactgcatcggagttctggcgttatcacggctgaccattttcaggcagttcagcatctcttcttctgtcatcagaccgctctcggtatactctttgtatgcattgatagcttcgatatctttgtaatcatcaatggatttgaaatatgcattagtcataccaatttcttcgccctgatagatatatggagaacctttcagcatatgcaggcaggttgcgatcatctttgcggatacctcacggtacatcgggctgtcatcaccgaatctggatacggcacgcggctgatcgtggttatcccagtacagactgttccatgcttttccttccaggtcattctgccatttgttcatgaccgcacggacttttttcatttccggtttcttagtggtccatttgccgtattttccgtctgttgttcccatgtgttcgaactggaataccatgttcagttcgcttccatccagatttgcatatttctttgcttcctctgtggtaacacctggtgtttcaccaacggtgatcagatcaaatttggaaagtacacgctggttcatttcctgcagatattcgtgtacatgaggtccgttgcatacatatggtgacatatcgccgtgcagtccatcacggatctctccgtccggatatgcaggatctttggagatcatgctgataacatccatacggaaaccatctacacctttttcacaccaccaggtcatcatgttaaatacttcatcacgtactaccgggttctcccagttcagatccggctgttttttggagaagcagtgcagataatacattcctgtttcttcgtcaaattcccagacagaacctccgaagcatgctccccagttatttggctcttttccgtctttcggatctttccagatatagtaatcacgatacggattgtcttttgattttttgctttccaggaaccatctgtgttcatcggagctgtggtttactaccaggtccatcaccagtttgatgcctcgtttgtgcatctcagcgatcatccggtcaaagtcttccatggttccgaaatcggtcatgatatcctgataatcggagatatcatatccgttgtcatcgttcggggatttatagactggtgacagccagatcacatcaactcccagttctttcagataatccagatgttcggtaataccattcagatcaccgataccgtcaccgttgctgtctgcgaaacttcttggataaatctggtaaatcacactacttttccaccatgctttgctcatatgtttgtcctcttttctttcttccgaaaattttctgtattttcagactcgttttcatatatattcatgatactatatttcatttcccatttcttgtaatatattgctatttatttatactatattcactttctgttgctctgtttttgacacctatgtaatatctttctgtatgtttcttccctttttcataagaaatacacaaaacagagcaatcgttactgttcactccgatcccggtaacacgcttcgtgggatattaccaatgaacagtaacgaatattccacgatatccctgtgatccatgtgtcatctctttcttttttgaaaatcatgtgatatctttagaatataaacatagcattttgagataattactcgattaaattttaattaaaggactgtatttacatgaataccttatcttatcacgaaagtcactctcatggttctctcggtcttccgtttcaggcatactctcaggaagatccttacgggcaatactttgtgccatatcactggcatgaggaagtggaatttatatatgttaccaaaggaagtcttgtacttcgtacccagaaccgtacccggctgctccaggaaggacatatttattttattaatcccggcacactgcacggactgtttggaaacagtccgttttcccaccattatgcgctggttttccggttggatatgctgaattttcttcagacagattcctgccagacctcttatctggtacctctttgcaccggaaaatatctgtttcccgatagtgaagcacttgctccggaactcactgctcagattgctgcactcataaaaaaagcagccgacgagtaccgaaactgcgatacctcgctgactgccgctctctcgatcaagatcacgctgttgcagattctggaactgctgtttgccagccagtcctttatccccggtacacaggcaggagaaacttccggtgatgtgaatccgttaaaagctgtattttcttatattgaatctcactacggagaaaaaatatctctggaagaccttgccggcacaattcatatgaaccggaattatttctgccgtttttttaaagaaaaggcaggaaaaacaccgttttcctacctgaatgaataccgggtcaaccaggcggcctcccagctgctctccacccggcttcccatcactgagattgcattaaacgccggtttcgaaaatatgagttattttatccgtcagttcagacgctgcaaaggctgtaccccttctgcctaccggaataccgaagaccccaagtctctgccgattccgttctgacattccgtatctgtttttccgtcaggcagtcacctgtttttttgtgcgggttacccattggaacacaatcacaaacagcacacctttaacaatggaagtcgatgacagtgcccaccagataccgttcagtcccagcgaagtccctccaagaatgatcgccagcggtatccgggcactggtaaagattatgctgatcacactgcatagatgtgtccttcccagtccggaaagcgctcctactgtcgttgtctcgatacataaaaaggcttcgctgaatccaacgatgatcagataatcaaccgctgtggcaatcgctttcggctcatggaagaaaatatttgcgatcggacgcggaacacacacaaacaacagcgtaatgaaaatcccccagattccgactgtccactgagatgcccgatatcctttctttacacgccccatctctcccgcaccatagttctgcgcgataaacgcatttaacgcggtggcgaatccgtctgccgtattccaggatatggattcaatctgtcctcccacacgctgtgtggcgatggcttctgcaccaaaagcagataccatgcgggtgattaccatcgatatcacgcagtatgccattccctgtatcgcagtaggaattccgattttgcagatcccgttcagatattctgccggaatttttgcgaacagggtaataccttttaatacattttctttcttctgtttcacgattccaagaatcatgatactcataacgataaactgcgccgttaccgttgcaatggctcctcctgccgcacccagtttcggaagcggtcccggtccgagaatcagaagcggatccaggatcatattcgtcgccagaccgatcaggttcgcataaaacggtgttttcgaatctccctgcgccgtatagataccggtcagtgtcaccgacaaaaatgaaaagacgatcagtccgcaggcaatctttgtgtagacaaatgccgccgcatacgcctccggatcctccagtttaaaaaatccgatcatctgctttgtaaaaataagtacaaccagtgcatacaccagccccatcaccgttgccagctgaaccgccgcctgggcatacccatgagccttttccttatctcctcttccgacacactgcgccacctgcacctgtccgcccattcttgccatagatgcaaatccctgagacagccaggtgaacatgcctccgacaccgataccagccactgcttttgagccgagcagtccgacccatgccatatcggtaatgttgtataaagttcccagaaaggaagacgccatgatcggtatcgccagtttggtcagcgtcttcagaataggccccttcgtcaaatttccttccatgtaatataattctccttacatcatatttttctttttgtgcttcatccactatttctctgattttatgcttcccatggtgtcggatctttctttaaaagttccggaaacgtgatcatcgccggctgttttttctgatgttcgccgattattttctccatccacaccatgttataccaggtatcaaacttatacccgcactgatagaattctcccaccagccggtatcccagatgatgatgaaaatccatgctgttgcggtcaagatgttcatccggcacctccggtacaccgatgcaggcattcagatttgtgatgttctgctttttcaacacctgttccagcgccgcatacatcttccttccaagtcctctctttttctgatcttcccggatatagatcgtcgtctctaccgcccagtcgtaagcagaccgctcattgaatgtccctgcatacacataccccaacagcttcccgttttcttccagtaccagatatgggtatttcgtcagaatatgacggatccgtccggcgaactcttcctccgacggtacttcatattcgaatgtgatcgctgttttctccacataaggcgcgtagatctccagaagtccttttgcatcttccggctttgccacccggatcgtcagttcttctttcatgctatccctctccttttttcaaacatatgttttatcttaccattccaccgcccgatatgcaatgtgaatccgtattacagtcgttttttcttattttaataaaatttagaataaccgatagattttttttatcataccgcaaataatacgaattagtacttgttatgcttttgttatacaattaacacatacatgatacccaaacgtcaaaaagtcggaagtctgacgcaggcttgcttgtaggaagatttctgaccttgagactcgcaagaaacatgagtaagtagccattttttaagaaaaatgcgcagattacgaatgtttttgaggattgggagagtacgaagtacggaacaatccggtatcaaatggggcaaaacactttttgccccatcacctacaaaactctcagggaggtttctttatgaaaggcaattatcagcatatcttcaccccattgactgtgaagaatatgactatcaaaaaccgtatcactatgatgccgatgggcacaaactatggtgaacagaacggtgaaatgagttttcttcatattaattattacgaacagcgtgcgaaaggaggtaccggtctgattatcgtggaaaacgccagtgtggactctccgcagggctccaacggtaccactcagcttcgtatcgatcatgacaactatctgcctcgtctgttcaagttctgtgaaaatattcacagatacggaacctgcattgccatccagatcaaccatgccggtgcttccgcagtatcatcccgtatcaacatgcagccggtgtccgcatcggatataccaaccaaagacggcggtgatatcccgcgcccgttaacaaaagaagagatcctggatatcgtaaaaaaatacggacaggctgcaaaacgtgcgcagatcgcaggttttgacgctgtagagattcatgcaggacactcttacctgatcagccagtttctctctcctaccaccaacaaacgtactgatgagttcggtggttccgtggagaacagaacacgtttctgccgtatggtcatcgaagaagtcagaaaacaagtaggacctttctttccgatcatgctgcgtctgagtgcagatgagatggtagaaggtggaaacacactggaagatactttgaaatatctggaatatgtacaggaagaagtggatatcttcgacgtatcctgtggtctgaacagttccatccagtatcagatcgatgccaattatatgaaagacggatggcgttcctacatgccaagagctgtcaaagaaaaattcggcaaaccatgtatctccatgggaaatatccgtgatccgaaagttgcggaaaagatcctggctgacggcgatgctgatctgatcggtatgggccgtggactgatcgctgatccggaatgggtaaataaagttgcaaccggtcacgaatgtgatatccgcaaatgtatctcctgtaacatcggctgtgccggaaaccgtatcggcttcaaccgtccgatccgttgtacggtcaacccgtccgtactcgaaggcgatacctacagatcccaaaaagtcaataaaaactgtaacgtagttgtgatcggtggaggtaccgcaggtctggaagctgcctgtacagctgctgaggtaggatgtaacaccttccttctggaagaaaaagagactctgggcggtctggctgctgagatctccaagatcccggcaaagaaacgtctggctgatttcccgcactatctggaacaccgtgcagccggtctggataacctctatatctttaccggaacccatgcaacgccggaaaatatccgcaaattccatccgaacctgatcgtcaacgcgaccggctccggccctctgcttcctccgatcaatggtctgatggataatattgacaaagaaggcggaaatgtttattctatcttaggtatgatcagtcatatcaacgattttccgcaggatctggaaggcaaaaagatagctgttatcggtggcggtgccgtaggtcttgatgttgtggaattctttgcggcacgtaaagcggatatctctatcgttgaaatgatggatcagatcggccgtgatttggatccggtaaccaaaaacgatacaaaatgtatgatgaaatctcacgacgtacatcagcttaccaagaccgctcttctggaagtaaaagcagactccttcctggtaaaaggaagcgaaggcgaatatgaacttccattcgattacggcttcgtatgtctgggaatgagagccaaaggtcagttgtactctcagcttctggaagctttctcagatgacgatgtggaagtcatcaacatcggtgacagccagagagcccgccgtatcattgacggaaccatggaaggaagaaatatcctgtaccatctgacccagagaggttatctggattaattcatatttttcataaccatcctatatcggtggatctatccgccgatattgatgataaaaaaagcgtaattgttccgtgcttgcacagttttgaacaattacaggaaaggacaaaaaatcatggcagaaagaatcacaggacacacagaacttattggactgatggcttacccgatccgtcattccagctcaccggcaatgcagaacgaagcatttgcaaaattaggttacgactatgcatatctggcatttgaagttggcgctgatgaaatcgaggacgctgtaaaagccatccgtactctgaaaatgagaggatccaacgtatccatgccgaacaaaacactggtaggacagtatcttgacgaactgtcaccggcagccgaactttgcggtgctgtaaacaccatcgtcaatgataacggtcatctgaccggtcatatcacagacggtatcggttttatgcagtctctgaaagacaacaacatcgatgtgatcggcaaaaagatgaccatcgtaggtgccggcggtgctgctacagctattgagatccaggcggcactggacggagtttcagaaatcgtaatcttcaaccgcaaagacgaattctgggaccgtgcagtatctaccgtagaaaagatcaacacccggacttcttctcacgcagtactctacgatctggcagatcttgacaaactgaaagaagagatggatgacagctacctgtttgtcaacgctaccggtgttggtatgaaaccgctggaaggacagtccgtagtaccggacaaatcttacttccgttcggagctgatcgttgtcgatgttccttattctccactagagacaaagatgcgttccatggcaaaagaagttggatgcaagaccatgaacggtctgggcatgatgctgttccagggatctgctgctttcgagttgtggaccggcgaaccgatgcctatcgaacacatgaaagaagttctgaacatcaaatacgactaaaatgtaaaacgtttttcaggaaaggaaaactctatgaatactgtaaaagtaagaaacattaccatcggcgaaggcagaccgaagatctgtgttccgatcgttggtaaaacccgcgaggaaatcctcaaagaagcctctaccttctccgcactgcctgtagatgttgcagagtggcgtgtggactggtacgatgacgtcttcgataccgaggaagttctgaccaccgctaagcagctgaatgaagctctgggcgagattcctgtactcttcactttccgaacctccaaggaaggcggagaaaaagaaatctctccggaacagtatgcacagttaaacaaagccgtagcggaaagcggctatgtggatctggtggatgtggaagcatttaccggggatgagattgtaacctccatcatttctcatgcccatgcaaatggcgtaaaagtcatcgcttccaaccatgactttgcaaaaacccctgagaaagacgagattgttcgccgtctcaggaaaatgcagaccctcggcgcagacattcctaagattgctctgatgccaaactgcaaaaaagatgttctgacacttttagaagccactctggaaatgtcagaacagtacgcagaccgcccgattatcaccatgtctatggccggaacgggtgttgtaagccgtctgaccggtgagacctttggttccgcactgaccttcggtgccgcttccaaagcttctgcacctggacagatcggtgtccatgaattgaaacaggttctggacatcattcacaaaagtctgtaatacagaaaataataaagctttaaaaacataatttcaaattcctacctatttcataatccttttatataataaagataaaaagagaagacctgccgtaatttccccttaccacaggccttctctttttgttatctgctttttacgttattctgtattttgctttactcttctcctgtttttactatcctaaaacagacgctcctattccatgaataaaatacgtaaaatacaatgcgagagatgttatcacataattcttcttgctgttctgtttcattttttacctcattttattttgcgttttccgcctggaactttttatattcctctacaggcatatccaggccggtatataatttgtaggctgcaactccctgccacagaagcatgccttttccgccgatggtctttgcacagccggcttctcttgcttcccggaggagttttgtttcttccggattgtatacaacatcgcatactaccagatccggacggaatacggatttgtccgtaatcagggaaacatcttcatgaggtttcatccctgccagtgttccgtttaccagaatatctgcttttgcgatctcttctttcagtttgtcctgatcttcgatacagaatacctgaacatcgcaatccggtacttcttttttcagctttgcagctgtattttttgcgcgatccaggaaaggatcgttcgggttaaagatggaaatagatgctgctccgtccagtgcacactgcacctggatcgctgttgcggctccacctgcacctaatactaccattttctttccttttacatctacaccgtggtctctcaggttttcaacaaatccgattccgtctgtcatatgaccgaccagttttccgttttcgttgacgattgtattgactgcaccgatgattcttgctgctgcggataattcgtccatgttctgtgctgctgcggttttgcacggcattgttacgttgcatcctctcatgttaaacagacgcatggcatccagcgctgccggtacctgatcttctttgatatcaaaagccatgtagcaataatccagattatgatagcggaagcagaaattgtacatatccggggatcccgaatgtcctaccgggcttccaatcagtgccaataatcctgttgttcctttgattctctgttccatcttcttttcctcctgttttgggtctaaatctgagatgccacatcgtaggcttctttcgttgcatccagtgcgcgtcttgcacggattgcatcaccgattacataggtatccggtacgatagctttcacctgttcttcaagaggattataatttctgtaacccatggacaggacaacggaatcgtagcctctggtctcgtgatgttcgccgtctgctgtctcatactctacgccgtcttcgaagaatctgcatacttttgctccggtaatctgaccgataccgtaatcttcgaaatctttcatcagatataccctgtgctcatggatcacatctgcaccaaccgtatctctgaattcaatgactgttacctcgtggttctgttcgccaaggaaggctgctgtctcacagccaaccattccgccgccgactaccagtactttcttacctgctgcacgctttccttccagcagatctgatccgtaaataatggacggatgatcgatgccttcgatcggcagtaccagtgtctttgagcctgttgcaagaatcacgctgtccgggttttcctctttgatgaagtctgctgtcacctcgtggttcaattttatctcaactccatctttttggcaacgatgaatgtagctgcgaatcatgtttgtgatatcaccttttcccggcgggtaagcggccagtcgcatatttccgccaagcttttcgcctgcttcgtataaagtaacctcatggcctctttcttttgcgacaaaggctgcgcacagaccggcaacaccgccaccgattaccatgatcttcttcggtgtttctgcctgttttaacggttctgcatcatgacccaggaacgggtttgtcagacaacataacggttttcctgcatacatatttgccacacagccctgcagacaggcgatacacgggatcatatcttccagacgctcttcttttgcttttttcggcatatgcggatctgccagactctggcgtccgaaagctaccagatcgcagcgtccttcttttaccatcagttctgcgaactgcggttcggtataacggcccactgtgataaccgggatgtttaccgcacgtttgatctcttccaccagttcagcggagaatccaccatggatcacagtcggtgcccacatatactcatctttgatatgaacggctcgtgagacatggatggcatccagtccacaggattccagataagcggcgattgctgcgctgtcatgtacatccagaccgcccggaacttcatcatcagaattgattcttgccagaacggcaatctttccttcggtctgtttcttgatttcttcaataatcagtctggagaaacgcatccggttttcaaagcatccgccgaattcatccacacgcttattggtgcgtggggacataaaagtgcttaccagatatccatgcgccatgtggatctctacagcatccacaccggcttccattgctcttcttgctgcttctccgtaaccttttaccagttcatacacttcttcggtagataattctctcggaatatctcttccgcaggctgccgggatactggtagctgctgtgatcggtgctcctgcattttttgcatttccttccggacctgcattctgcagctgaacggaaacctttgcaccttctgcatgacaggcatctaccacctttttaaagctttcgatggtagaatcatcatacagacatggttttctcgggccacctttggctcctttatgtacaacagttgcttcgatggtgatcagtccgaatccaccttttgcacgttccctgtagtaagcaacagactgttcactcatggttccgtcggtattggcaaagttattgcccatcggaggaactacaaaacggttctttaccgttatcggtccgatctgaatcggctgaaacattgcatcaaatttcatatctgctctccttttcttagttcagtacttccggccatgcctcttcgagtactttctttgtattttcataagtatgttttgctgcatactcgatgcctttttccaggtttgcatcgctgataacctctacgccgattgcgtttggctcgatgcctttttcacgaaccatttttacaaatgctgcggtgcatccgatgccggttcccggtgccagacggtcatgcatggattcatctcttaaaatcgtagttgcatacggtctttcccatacatcgttgatctggatggacacgactttgtctgcaggaacatctgccagtacggaaatatctaccggctggtttgctcttacccagtgccaggtatccagtatcagtttggcgttgtcacaatctgctgcttttacaaccgcccagccttttttcacatccgggataccgctgtatggcattggttctacaccgatgatgtattttccggctctgtggcacagctcacgcagtttctgtgcggtgtattctacagaatagttttccatcagaccacagttgatctgttttacattaaataattcacacatatggaagcacatctgctctttgtatttctgctcataagaacgatgttcttctgcccactgtacgatgtactctacctctgtaactttcatatcatatttttccagaatgttcaggatatcctgatcgaacagtccctcatttaaggcatctacataagtttctgcacgaagaccgataccttcgtatccggcattctttgctgctgcaacacgctcttcaaaagtacactgatctcccagtgtccaggaactgatagtaattggaaatctctttgacatgatatttttcctcctgaaagaatccattttttgtcttttgttacttctgattatataactttgttaaattcaagacaaattgattgtatttgagtattcatagattttgtcaatatatcgtgatatactatagaagataacttgtaactgtatgcagtatagacggttacttctggcttgcggaggatactttttattaggaggttacctgtttatgaatctttatcatttacgatactttgtgacactggcacatatggaacattatacccgggctgcggatcttctggcgatcactcagccgagtctgagtcatgcgatctcttccctcgaatccgaacttggggtgaaattatttaagaaaaacggacggaatgtcacccttaccaaatacggaaaatcctttctcaccgatgccgaggatattctgcagaagctggattcttccgtcggcaatttacagcttgccggtaaaggtgaggggcggatcgacattgcattcctgcgaactctgggaagtgattttgttccccggatcctgcgtcgttttctggatgagaatcagggaaaacagatcgactttgctttgcactgcgataaagtgatcacaaatgagattctgaaaggcataaaagaacaaaaatatgatatcggcttctgttccaaaatcaatgatgaaccactgattgaatttatcccggtcgccaaacaggatcttgtagtcatcgtgccaccggatcatccgcttgcttccaaatcggagatccatctggaagagacactcgagtacaagcagatcatctataagagcggaagcggtcttcgacacatcatcgatcatttattcgatcagattggtgcttatccggatgtttcctatgagattgcggaagatcacgtggttgccggttttgtcgctaacggtttcggaattgctgtggcgccggatataccgatcattcattcgctgaatctgaaagttctgcccctggtttccccgacctggcaaagaaacttttatatggctaccttaaaagatgcctatcatccgccggtggtggatatcttcaaacagtttgtcattgaccagacacgaggggaacttgattaccggacgatctgatcctgcccggtatctgttatcattggaacacgaactttggctctttgctcgcgtaactaaaaaaggtccaccggacctttttgtcgtatgcttggcaacgcaaaaaagcagcagaaacaatgtttttccattgcttctgctgctttttatgtgctttttataaattatttgttatccatctgacgcagtctgtggatcagttcttcgcagatctgcagctcatcttttccatcggtctcgatgacgatatcggcagctgcctcgtatttttctctacgtttttccatcagttccgcgatgaatggtaccgtcttgttgttttcgatcagtggacggtcatggctgtctttgacacgatccagaatcgtctccggttttgcggtcagtaatacgacacgaccatttttcttcatctccacaacgttgcactctctcatcggagtaccgccaccacaggagataaccacattggttctcgactgcatctcgatcagcaggttagtctccagatcgcggaaatactgctcgccatacacttcgaagatatcggagatactcattccttctctctcggcgatgatctgatccatctcgatcacatccatcgcaaatgcggttttcagaaattcagaaatcgtactcttacccgctcccatgaagccaatcaggacgatattatagttgaacagttttcttgcctgaattcttttactgttctgggtaatgcttccaaagacatcttccacttctgctttatggcgtctgtctgccatccggcgctccagccattctttctgttttgcttcctgttccggctgcaggatcgggatatcatttgcctctttatatgccatgatatcttctacaatacggttacgcataagcagtgcatccagaataatttcatcgcactgtccaagactttctcttaatatttccaactgattcattcttcttaccttcctttttcaagttcaagactttaacatcttttcgttattataacaggtgtttttagttatcacaatacgatttaatgttttttcactttaaattgctaaattttagaaaattctgttcccggcgcgcccgattttcccttttgcgttgttgacagtcccttactcgggctttataattaatttatattgctctgtcagacgcatactgcagttacacattatttacagagcacaaaggagagtttttatgaagcaaattattttaaccggcgaccgtccaaccggtcgtcttcatgtgggtcattatgtcggatccctgaaagaaagagtaaaattacagaactccggcaactatgacgaaatctatattatgatcgccgatgcgcaggcattgaccgataacgcagaacacccggagaaagttcgtcagaacatcatgcaggtagcactcgattatcttgcctgtggtctggatccggagaaatccacgattttcatccagtccatgatcccggaactgactgagctgactttctactatatgaatctggttaccgtatcccgtgtacagcgtaaccctactgtaaaagctgagatccagatgagaaacttcgaagccagcatcccggttggattcttctgttatccgatcagccaggccgctgacatcaccgctttccgtgccacaagtgtaccggtaggtgaagaccagatgccgatgatcgaacagtgtaaagaaatcgtacacaagttcaacagcgtatacggcgaaaccctgacagagccaaagatcgtcctgccaagcaaccaggcctgcctgcgtctgccgggtatcgacggtaaggcaaaaatgagcaaatcccttggcaactgcatctacctgtccgacgaatcggaagatatcagaaccaagatcatgtccatgttcactgatccgaaccacatccgtgtgcaggatcccggaaaagtggaaggcaacccggtattcatctatctggacgcattctgtcgcccggaacactttgaagaattcctgccggactacaacaacctggatgaactgaaagcccactatcagcgcggtggcctgggcgatgtaaaagtaaagaaattcctgaataacgttattcagtccgaacttgagccgatccgtaaccgccgtaaaatgtgggagaaaaacctgccggacgtatacgacatcctgaaaaaaggcagcgccgcagccagagaaaccgccgccaaaacattggacgatgttcgtcactccatgcgcatcgactacttcacagatgacaatctgttgaaataaaagaaaacatatcagcatttctgctgactgtaataaaaaagctactgttccatcggtattcttcatacctcatggttcagtagcttttttctataaaataagattttcctttccatgattcattcctatactaccatttcaaaacttaaaaactcgaagctaaaagttgtaaaacaactgtactattttcccccctgaatcaaatctcagtcttcaccaataacctacacccacacaccctctcttccgccttgaaaaaacagcaaaccaggagccggggaacaggttcagacaacactttgtgggcggttaggacaagctttgaaatccgacacttacggagactttcgcttgggtcagccgacccaagtgaatatagtcgcagttagtggctagttcaaagttgtcctgcccacgttgtcagaatctgttccccggctcctggcttgcgtccctttttcaattaaccttcaaacttagaactatgatcccgacaaggaaccggcaatttcagaatatccagtttcatctgatctgcatcctcaaccgagaaaaatctctgctcctccagaacatcaatcgccttgaaaatcttatcaatataatcccgtctcgtaggatacagttttttcagcttctcttcagagaaatacacacaacaactgtcctgatcgttcttctttgttccgctgcagtaagtagctaccggcacatccagctgtggaaaacggaaaccacccttacagttattgttttcatccagaacctcaatatgattctcatccacctcaatcagaccctgtgcatgcggagccggaatcccctctctcacccacagatccagattcgtcagagcctgacgcataaatgcctctaacggcagagctgtgatatcagtatgcggaagaccggttgtcttctgaatctggtcaatctctgcatatcccggacgataaaacgcaccggagaaagagttatgagcctgtcctgccagctcatacagacggaaacgatccccttctgcatcactatccgctcttctcagattgatatgacctgtgaaatccttaaaatcccactgtgtcacacaccgaagaaccggaaccggacaatttcttgttttctgaatctcgtctgtcacatcggccggagactcttcctgattcagagccaccatacggcatccggaatatgtcagatacccatcatatggaacctcaaccggtgatactctgtctgtctcatggaatacatttatataagtagataactgcatggaagactgcgaacagctgatcgcataaatcttctccacttcttttcctgcaatctgtgtaccctgcccggacttgaacagatttcccagttgcgtcagcatatcccataacagaccgtcctcgcagtcttccagacaatgctgccacagtaaaatatcgtggttgaccggccccggattcggatttggattcttccaggacaatttctcataccgttttgtatcgtactgttttaacgtctttgtacagatcgcacgtaccgtcacaccaacatagatgtctccctcatgaagcattttctgccacagcaggcaccacatcgggcttacatcccagctgtttgtggaattcagcagctctacaacgacatttccgctgaatttcttcggatctttcggtttgcggatgataaaacggttggtatacggtgcatttgaaagttttacctgcgcctgtccatcctttaatgtataaacatcagcttctccggaatacagatactcttcttcctcatatccatatttttccagatacgtcggaaccagctgacgatctgctgctccccatgggaaagaatcctctgtacgaggaagtaaaattgcctgtggaattcttttttccataacaaatgttctcctttcgcttcgttccatttttctttttatacagacagaggctgtcgcatcaaacccttgattgccacagcctccgctattttcatgaatcgctgtgagtattattcacagtttttatttatatcagtccggcaaacattccgcttccaacaggaattaagattgctgcacagatcacgatcataactgcacagaaagccacactgtattttgctgttcctttgtattcaataccgatatccgaataaatgattcccatcagcgggcatgcgctcagcgtacagattgcagtaccacagatagcgataacggcacatccgaaagccagaacctgtgcctggttgattccaggaacggacatcagagccgggatacagctggagcatacgataacaccggatacggtattggaacagaagttggttgccagactggcaacgatcagtccgataacgatggttacgattaccggcatttttgcaacaaccggtcccaggatattctgcagacacaaagtgataccgtaatcatctccacctactgctcctgcatagaacatgatggcacccaggaatacgatcattccccacggtacttttgctgctgctttaccgaagtccataaccgattttccgtcaacagtgatcacacacagcagtgcgcataccagagttaccggtgctgcgatcgtaatgccactgaagtaggtagcaaccggtcccaggaattccatagaagccaggatgtagcacagcaggatcacgcccataccagccagagcgattttacctcttttgctgatcggagttttcttcagttcttcacgcattgctgcgtcatcaaaactcttgaactttgatacgtccggtcgcatccacagttttaccatcagaattgccacgacaactgcaaataacagatacagacctgcaaacttgaagtacgttgccgcgctgaagttgccaaatcccagacctgctacaattgcaaccatagtcagaatgtatggtcttccccagatcagagtaccatcacataactgagagatccagccgatcagcagaccctgtgatttgtagaagctgtcttcttttgtatatccgatagaagttgttacatcttccagcagtttgaagaacagtacggctactacctgtggtgcggtaaagatagagataatgatcatggccagtgtaaacatgatcataaacagtgttggtcttccatgaatgaactttctggaaatgatccattttacgatccattcaaatgcaccgctctcttccagaacggttgcaaccatcataaatggaataatggcagcacatactacgttaccccataaggttccgtatgcatttgcacctgcataggttccgagaagaactgctacggtaacgctcagaagagaggtccagcttgttccgcatgtcagccacaaataaatcgttggcaggaacacggacagcatagcaatgccggcttttgtcagcccgtttgcttccggaagaagaaaatacagtaatacgcctgccagaaccgcaatgagaaagtgtttctgttgctttttcataagtgatctccttttcagttaattttcgatgatgtctggtacccgatgtttcataactgcaagggtaggatcctttccattcagttatttttttaacacgcccaatccgatgtacttttgtcaaaaccaaatatttttccggttttttttaaattacattcgtcacattcaccataattttattataatagtttgttaaaacaaaaacaaatagatgctattttgggattcatagattttttttatatttttgacattttttctactattcgataaacctatagaaaaagacctgcgaatgtcattattttttgtgatgttttctatagaatcacgcaaaattcatccggacattccagatctttttctctttctattgatttttactctccggtagcttcccggtaggcttcgcttcccacctcgctccaggatgttttttcaccggaaattacttctccagtcgttttgttcaccgcatagaatccaagcaactgtgtatcttttccggtttcttctctttcatagacaaacagttcacaggctccattcgctgacgttcgatcataaaccagacgattgtcccaggtatttccatcttcttccccactttcgaaaatggcataaaaattccctttggcattgcaaccgacagtcacttgtgaggaatctcctccgtctgcaatctcaccatgttctttcatataagtatacactgcccgcgcctgagactccaacggatcttccgcgtcggtatccgcttctccatctgctgtgtcaccggtatctgttgtatcttctccagtcatctgattttcttctgcttcgttattgtactgtgttttcccgtcggatgcctgctctgacgaatcgctttccggcgtttcctccatgataccgtacccgatactctcatccaatgtcatggtttttctgagaaacagacccacggatttgttataataataatctggaggatccagccagttttcgtgtttcatctcgattacaccatttggccgtacctccacttccgcatcatttccaaggacctgcagtacctgcacaagaccattccacaaaaagaaacagatccagaaaataaccagaaagattttctgtatggttttggcactttttcctttttccgtctgttttccgatcagccggatcagttttaccagccagtaaagggtaagcgctgtccatccgaagaaaaggacgaagaaggaagtgtccacgacccagcctctgtaatgatatctccaggagagtaaaccattgatcccataataaacaccggtatacagaatcaacaccgctgccagtatcgtaaccaccggtcgggtggctttctgttcctcccagtcacttaccgccagcaccagtttatccggactgctctccggcataaacaggttttctatttcttcctgtgacagctgctgcggttttttcggaatcgcataacaactggacagtgcttcctgccagccttcctgtgcatccagataagatgctgccgcctgataaaagtaatagcttcgaagctgtgctacatttaacttttcccgttttacaagttccagtgcctgtagcgccatctgcggacggtgcaattcgatctgctgtcttgccatctgtaacaatgtgatggaacacagtttttcattctttttatataaggtacgatacatggcgtaattgtaatcatgccgctcctgcacttcccgttttttcatccgcacaatatcgatccggttacgcgcaaacaacaataataccagaaacacaaccactgagaaaaacaataacacgcatggttttagcatctcattggtataatcctcccttttgaatgtcatatatagcaaaagataagtaagaatccccgccagagcaaccagaatctggaagatccgttgtctccgaagccgccacagccccagccgatagcctcgggtgggcggagtggacgggtgggaaagatcataataattcattacgtattcacctcgcatccatagactgattttaatccgttgattctcctgaaagattcatctctttttccggtactccctgcgactgaatgataaatccatcccttgcatcaaaccgaatcacatactcatattcgctctcctgtccttcttttgcagcttcagcatctacataataactgagccggatatggtacagatttttcttttctttccaggactcatccccaataagccagtcatcttccagatgtttttcattttttaacagagtttccgcatactgctgtgcaccactccacacaccgctgtctcctttttgtctctggatcgtaccctgatactgccagagtgtcgcacacaaaagcactcccataaccacagaaaacatcactgttttgtaacgcttctcttttttctgtctctgcttccggatcacccgaagagttcccacaagaaacataacaattaccagaagataccacaccgtccagaaaatttcctgttgcgtgtcgattcccccgggcaggatttcactcagccgatctccccagacatactgtgccagcgccagcaagaatccaaccgaaagaatcgccgcaacaccgtagatttttctgctctcttcatcgtcgatattctggaaaaaataccacagcgatacaaaaacggttgctgcgatacctccgatcaccagcgctcctccaagacttgccagctttgtcatccacacaatcacggtaatcgcagccaacacgatcccggcaatcacattagcattccgatcctgttttttctgctgtctggaaatatctcctgcattctgtaacatttcagccacctctccctgggtatatctgcgttcttccggttgttgatcctgctcctctgtttcttttttttcggagcgcatcagttccagaaccgtaattccaagagcttgtgccagcggttccagcgtttggatatccggaaacccaagccccgtttcccttagttaaagatattgttgggtatctcaagatgtgtcattcgattttgccgataaagcggtagaagatttccacttcctgttcccggcttccgtcctcacttttgaccgcttcatggacaaggattttttcaatcagcgtattcagaagttcagccgtcaattctgtgggattgacatactgtttcatcagacctatccacttttcagcgtcaaccgctgtctgggcggcggcctccatcgcttcgtgaagccgttcaatttttgcgtccaattctcgctgttcgccctgatacttttcggacagcatattgaaattgtattctgtaatgcgtccggcagaccagtcctcatacatttttgcaaacagggtgtctacttctgctttgcgcttttccgcctttttcagttcggctgtctgccgcttccttgcagtattgcgttccttgtcgctggcgttaagtagccgtttcagaagtttgtccccatcctgctgtaccagcacagaccagtattgcagacgggaaaggacataggcgtaaagcacatcatagcggatatagtgcatggaacactggtgcaatccttgcccgtacttgctacaatggtagtgggcatagggatttttgttctggctgttcataccataggccagcgaccagccgcagtccgcacattttaccagcccggaaaatatctgtgttgtgccgttcttctgccgtctgcgcctgttgcaaatctgctcctgtacttgacggaacacatcttcggaaataatcgcttcgtgggtgttctccacacgataccattcctcttttggcttgcgtactttcttcttgtttttgaatgaaatattggtctgcttattgtggacgctgtgtccgatataggtttcctctttcagaatacttttcacctgcgctatcgtccacgcataggctttttcctccggcgctccggcatagatatttgcgaaagtgccgtatctctggaaattcagccagccgggagtaggtactttttcttcgaccaaaatccgtgtaatgctggcggctccccggccatgaacggcaaggtcaaaaatcttttcgataatccaccttgtttccgggtcaatcagaagatggcctttcttatctgggtctttgacatagccaagcggagcataggctccatagtgtgcgccatttgcgaaccgtgtccgcatggccgcctttacctttttgctggtctggcgggcgtgcatttcattcagaatgttgaggaatggggcaagctcattctctccgttgatggtgtccacattgtcattgacagcgatatagcggacgcctttgctgggaaagtagatttccgtgtactggccggtcagaatgtagtttctgcctaagcgggataaatccttcgtaacaacgcagttgatttttccgtcctcaatgtcatcaatcattctctgaaaatccggcctgtcaaagttcgttccagaccatccatcgtcgatatattcatctatgacattcaggccatgctcggcggcatattgccggagcatcatgcgttgtgtctgaatactcccgctttctccttgcagttcatcgtcccggctcaatctcatataaagcgccgtgttgtaaatcgtagtattgtaaggttgtttcaccgttaaaaatcctccttctaaagaaacaacccacgcttacaatacttttgctctatggcaattatatcataagcgtgggcgtgttatcaatgatgggctatcaggttgaagcggctttttctgcggtatgccgcaccacatctacaatcagatcaccgaggggcttcccgcctgcggcgaagtgttcggagatttttatacggttgttcccacatacaaaatactgcgtgccgttctctgcttgtatgacctgccctgtccggggtgtaaaaatatcgctttcgctttttgccatccagtgtcctccatattcagttttcaaggtacaatgccgcacaggagcggcgaaaatttctgcttatactatcacctttcctttaccgtgtgccgctgctgccgtttcagttccgccagtatatccggcgggatacggtcaaccagccgctgtaaattgtccagttcgcttttcagctttgcccgttccatcgtatctttcatcttgcctttttcactggcctttgcccttgcttccaacttctcattctccgccaacaggtcattgattgtgaccttgtactttttcagttgcccggagaagttctccatctgggggaaccactttttcagcatggagagggcttcctcttttttctttccggcgttcagcgggttaatgccgtcaagagtggtttcaatggctctggcctgtttggagagggaaaccgcctgtttgaaaagccgggtggggatatgcttccggcctgtcttgctggcactctccccacgctccaagtcgggatatttctccaccatataggcgtgaaaatcgtcctgccacttcgtcaggtttgcccggttgccgataatctcctttgcacacaggcggttgtcctttgtcagcggaacaaaggtcaaatgcaggtggggcgttttctcgtccatgtgtaccaccgccgacacgatattttcccgtcctacccgtccaatgaggaagtccgccgcccgctggaagaacgcctgtatctcctttggggatttccccttgaaaaactccgggctggcggttatcagagtatcgacaaaccgtgtgctgtctttccttgtccggcatccggcctgctcgatacggctctgaatgaagtggtaatagcgtccctccggcttgacgatatggaagttgtatttgctccggcttgtgttaatgtcgggattgctggtatactgttctttctgtctttcgtgatgggcttccagcggccttgccgggttgcccttgtgcttctcaaaccgtaaaattgcgtgttgtgccattctgctcctttccccattcctttcctatccggggtttcctacagggaaaatcccgccggaattatctctgatacgataagaatggaatggatataaatcagtcattttaatctttgtatttctatataccgtccggttttcatacttcaggagggcggtttccgtacttcatgggtacggttttcagtcctccggcgtaccagaacgggatttcttgaagtcggtgtttggaaccgcttcataggattttggaaaaatgcgattgggttttccacagccctgcttctggatctccaccagtccggcgtattgcagttcccgcagggtattcaccgctttctgccgcccacagtggagcaggtcaaccacttcacagatggggtaatacaggaaaatccgtccgcagtcatccgcccacccattcttgcgggataactctgtccggcgcaggataaaggcgtacagaacctttgcctcgttggacaggggcttgaatgtgggggcttcaaagaggaaattcgggagccgggtgaagctgaacgccctttccggctgatggatatagatggtatttgtcatagtgcgttttgtggacggttagaagcccgttttccggggcggacgatactttataccacctgccccggtttggggcttgcgaagcctgataaatcaaggctttttccgctcctaactgtccacagcagacctccttttccgttcactttctgttttctgccgcctgtgagctctggcggcacagccggggcagtattttgcccggttggatttagggacaaatacaccgccgcagaccgcacagcgtttcaagtccttatcccggaaaatctccgcttccagcgttccgtccagcggcaaaaccgcccagcggaaccacttacagcagaccgagaaagaaaccgtctgcgggcaggtgcaggtgtccccatcgtcaaggacaatgcagttgccgtcctcacagcaacagcactctcggcgtatcaggctggccgcctgtttcctttgcgccggtgtcatgcggtaaagggaaccgtccagcctgcgttccagcggcggcaagtctttataggggttatctctcatgcgttccctccattttgctttccgttgccgttccccccgaaaagttttcctgccccattcctgcggcgtgttcccaacaggggcccccgcaaagtcgtcagactttgtggggagaggagccgcagcggagcgagtgagctttcgccctctggcggaagcgaatgatacgcagcttgcggcgacgaggcacgctccccgcagcttcgggacaaaatgtcccgaagctcggttccttgcggtgcttccccagccggggtattcctttttggacggtcattctgttttcaaggtgctgtccatcgatgaactatcctaagtctacacctaaatgaccgcccgtcccgtatatccgaaaggtaggaaatccgcccggaaaactccctatttccacgctctcggaattgtggtagaatgaaagtaagatttgcagacaaggagggagaacatggaactatccatacaagaacgcctgaaagacctgcgtgtggagcgtggcctgacgctggagcagcttgcggaagaaacccatctctccaagtctgcgttaggcagctatgagggggacaagttcaaggacatcagccactatgcccttatccagctggcaaagttctatgaagtgactgttgattatctgctgggccgttctcaaacaagaaatcacccaaacgccgatcttgcagacctgcatttgagtgatgatatgattgaactattgaaaagcgggctggtggacaattctcttttgtgtgagctggcgacacacccggattttccccggctcatgaccgaccttgaaatctatgtgaacggcatagcgggaaagcaggtgcagagcgcaaacgccattgtggacgctgtgagtgcaacgattatgaaacaacacagtcccggcttgactgacccgcagctgcgacagcttatcgccgcccacattgacgacgacagcttttgccgctatgtgatacagcaggacataaacaagatagccctcgacctgcgggaagcccacaaggacgattttttcagcgtcccggaggacaatcctctggaagattttttgcagacagccgaggaagccgctaaagaggacagcgacccggagcaggcggctatgatgtttatctgcaagcggctcaaactgaattataagaagctgtccgaggaagaaaggaagtggctgaaaaagattgcacagaagtcggatttgctgaaaaatccaaacccgcagcgggggagaaagtaagagagcgacaaattctaatttgtggaggaaaaacgtgttatgaatttagaggatttaagaatagattgtgctatcaagcaaaagagaggtattcattttatttcagcttctattgtgatttggcttttggtgatgatggtacaattcttagatttaccgattcttaccaagaatttgctaacattttgttgtaccgcaccactattgcctttagcatttttgatgtccaaattattaaagatccaatttcaggacaaaagcaatccactgaataatctaggtatattattttcgataaatcaaatcttatatttattgattgcaatgtggatttatccaacagtaccagaaaaaatgctaatggttattgctatgatttttggggcgcatttgttaccatatagctggttatataaatcaaaaacttacatgattatgtcagttcttatccctatagcttcattgattgttggatgtaattctacacgtttgatattagcgttaatgatgcttgtttttgaaattatatttacagcattgctcataatagaaaatagaaaaatataatgtcttgcacaacaactcccagtttatcggggaaatagcaaagccacaaaatggcttcccgcccatttcaatcttgagagaagaaacgctccaaaatcagaaagagagcggtaaatctgaattgcgagggagaatgtagatgaatcaaggaagaattattgtgattacaggttcgccgggaacaggaaagacaacaactgcgtcgattgtcgcaaaagaatcgaacatggataaatctgtgcatatgcacacagacgacttttttcattatttaagcaaaggagcaataccgccgcatttaccagagtccaacgaacaaaatttagttgtcattgaagcctttttagaagctgcaaagcgctatgcctgcggcggatatgatgtaattgtagatggaattgtcgggccgtggtttttagaaccatggagagcccttgttcgagaagattatgaagtacactatattgttttaagagccagtaaagaagaaactatgaaacgagctgtggaacgttcaaaattagacagaaaaacaaatgttgaattagtagaaacaatgtgggagcaattttgtaatttggggatatatgaatcgaatgttatagaaacgacaacctattctatccaagaggctgtttttgcagtaaaagaaaaaatttcaagtggagccgcattgctatcttaaacgatttctaaaaatcgaaatttcatttatcagagaaatagcaaagccagtcaacggtcaagatgaacggcgcattttatgcgccgccgttgacagtcccgcctgtctttgctgatgggtaatcaagtcgggaaagccctaaaatggcctcccgcccatttcaattttgagagaagaaacgctccaaaatcagaaagagagcggtaaatctgaattgcgagggagaatgtagatgaatcaaggaagaattattgtgattacaggttcgccgggaacaggaaagacaacaactgcgtcgattgtcgcaaaagaatcgaacatggataaatctgtgcatatgcacacagacgacttttttcattatttaagcaaaggagcaataccgccgcatttaccagagtccaacgaacaaaatttagttgtcattgaagcctttttagaagctgcaaagcgctatgcccgcggcggatatgatgtaattgtagatggaattgtcgggccgtggtttttagaaccatggagagcccttgttcgagaagattatgaagtacactatattgttttaagagccagtaaagaagaaactatgaaacgagctgtggaacgttcaaaattagacagaaaaacaaatgttgaattagtagaaacaatgtgggagcaattttgtaatttggggatatatgaatcgaatgttatagaaacgacaacctattctatccaagaggctgtttttgcagtaaaagaaaaaatttcaagtggagccgcattgctatcttaaacgatttctaaaaatcgaaatttcatttatcagagaaatagcaaaggcagccgagccagtcaacggtcaagatgaacggcgcatttcatgcgccgccgttgacagtcccgcccgtctttgctaaagggtaatcaaggcgggaaagccctaaaatggtttcacacctatttcaataattggaggagataaaaatgagatcagaaaaggaagtttatgatattgttttgaattttgcaaaaacagacaaacgcattcgcatggttactttggaaggatctagaacaaatacaaatattccgcctgatgattttcaggattttgatattactttttttgttacggatatggacagcttcacaagtgatgataaatggctagatatatttggcgaaaggttgattctgcaaaagccggaagatatggaattatttccagctgtagaaaagggattttcatatttaatgctgtttactgatgatgttaagatagatttaactttgctgccgctggaactgatagacgagtattttacatggaataaactggtaaagttactgttggataaagacaaccgtatcgtaaagccgccaataccaacggatatagactaccacttgcagaagcctactcaaagaatgtttgacgattgctgtaatgaattttggaatactacaacatatgtagtaaagggcttatgccgcaaagaaattctttttgctattgaccatatgaatgatatagtacgaaaagaattgcttcgcatgatttcctggctgattggtatcaaacagggatttcatttcagtttgggaaaaaactataaatttatgaagcaatatgccccagaggaattgtgggaacgacttatgtccacttataatatggattcctatccccatatgtgggaatcctttgaacaatgtatggcattgttccgggaggtttcgtcagaagtggcatgccagttggattaccagtatccactatatgatgaaaaaatcagtaattatgtgattcggcaaaagaaaaaatatggcattgaagatgataacaaataaaattttttcaatcggaaaaatttattttgattattcaattttgaaaaactgaatacctcaaaatcagaaagagcgcggacaagcactttgagggattggccgccttgtccacccatccagcggggcggcgggtggcggtcaaggccgggtgtaaacccgttcatttcagccttgacggttgcccgctgtcctgctatttttccgggagtgtggccacaacttcgggacactttgtccacaagttggagcgtaggacgaggaactggggctttcatatacgccctgtctgctgatgagtccagacctgcgcttgcggctccacgccacgcaagcacagccctgttttcctgccgcttcaaatgcccttgccctccccggcggcaacggcattttcacggcaacgccggcagagcgtataacacactacactttgcttcgcaaagtcgtgtgccaaatgggggcgttgccccctttggaaacccccacaagaaaaggcggtacgctacccctccacgggccgcataccgccttttcttgttatccagccctccggctgtatcggttgagcaaaagtccgcgtgggattgatgtggtatctttaactttgggaaactccccgctcccaacggctgaccgccttgtctgttacatgaatctgctgggcaagttctgcctgcgtcatttttttctcttttcgtattccggcgataaattgcccgaactgttttgcttccatgtggttccccttcttccctgtattctgcaactcccgctctttccctgtcgggtatcttattctggtattagcataggggaatccgggttgttttgtcaatctacgaatcgtttacccacaaaattcaggcgtttccagggcaagatacgcgatttcttcattggaaagtttcaacagcagtgcttcccggttcgtcttcatccggtctgctttcgacatactcgcgatagcgaaaatgttcaacggctgggaaaatatccagctcatggcaatctgtgctaccatcaccccatgtttttctgcaagaatctcacagcggcgaagacgttcaaaattatctggacacgcataccctttcattgcaaaagaatctagatagtcactggcatgatccgcatgcccgcttttcaatttgccggagaaaaagcctctgcccagagatgaataagcgatcaccggcatctgatttttttcataccatgctctggccgcttgattttccggtccgcagatattcacacatccgccaccccacggatcttcgacctgtcgggccagacaaaaattcgggctggaaacagaaaacgggatcaggttgtgtttgtaggcatattcattggcctcctcgattcttgtatgtgtccagttcgatgctccaaacgcaccgatgctcccttcttcatgcatggcattaaatgtctccactgctaccgccacctcggtatccaaatcatccctgtgaagcatatagatatcaatataatcggttttcaactcttccagtgacttcttcaaatcttttcgcatctctttctcattcacccgtttgttccacatggcatccggatgaccgcatttgctgagaatgactacctcctcccgtcttccactcttttccagccagttgccaaaggaatgctccgcttccatatagacccttgccgtatcaaaagcattgattccattggcccgagccgcctcaaaaaactccgttccatctgccccgtcctggatcggtggaaatgcagttcctgcaaaaattcgggatacttttttgtccacataaggaatcgaagcgtataaattttccttgttttccatgtctgttctttcctccccaatataaagtaacaggtcagaactttttctgcccgttctggatatcaccagtttaccatctgcaacacgcagattccatagacaaaacacatatttttcatatttccagtattacctttataccgccagtaccgaatccatgcacaaggtaagtgcatattcgtatgcattgccaccccagtttctctcgtcgtatttgtctacctcggcgagactgtctgccgtatataatatcattccccaggtcgcatccctaaatgctgcacaggcggcaagtgctgaacattccatttctaccacagagcatccttctgccttcctgtatgcaactttttcttttgtttcacggtaaaatccatcggttgaccaggtaatcacttcctgatatttcatcccgtgttccagtatcgtcttttcgatcgcttttcttgccattttattgatttccataaatctcgaaggctcagcataatggtaggacgttccttcatcgcgcaaagctttctccggtatcaggaaagttccttctgcaaattcctccaatgctccgcaactgcccgcagaaataatttcacgcactccatatccaatcagccagtccagaatctgcgtggcggctgccgcacccaccggtgcctgacaaagcacaattttttcacctttatatgttatgatataaataggatactttttggttgtactgataaaatacgatacaatctgcgcctctgtcttctccgcatattcatcaatatattcacccagaaatgcaaacacacatttctccggaagcaccagattcaaattctcatgcacgggactgatcactgctgtttgttctgtatcaaactccaatattggtattttattttttataatgctcatatgatttctccttttcccggttattttcgaaacagttttgtggtaatattaataaaaccagaaaactgtctgtcgaaactgtaatttttgttattttaacaaagttttagccattttacaagatatcttgatctgtttatcatttactccctgttcttgacgaatatcctgtaaaaccttataattgactcaaataagtaaggaggtgcagcactgtatgaataatgccttaccaatcgaagatttaagcaaaacttatcttgaacactctatggttatcaataattttgttatcaaaatcggcagtcagattaaggacagcctgtgtcgtgtctttggtgacggtgtacaatatgaatggcgtgagaatgatgataaagtaattattccagatgtctccatcatctgtaacctgagagatcgtaaaaatatttcttttactggtattccccgtttcgtaatggaagttttatccaatgccacggaagactatgaccgtcatgagaaaatggatatttactgtaaagtgggtgtctctgaatactggatcgttgactggagaaaaaaatccgtagaaatttatctttttgattttaaagaagatggtaccggttatccgtatctttacaaaaccgtcactattcagaataaagacgatttgcaattggtgatgtttccgaatcttaaaataacttttgatgaattatttgatattggagaatattaatgtacagaaaagcagcaggaacgcattttgcttcgttcctgctgcttttcactttccatctttagttcactgctttccgatacgcttcctcatccaccgcttcgcaccattccgtatgggtatcctctcccggaacgctgattgccaggtgggagaaccagctgtctgctgctgcaccgtgccagtgtttgacgcctgtcgggatgttgacgacatctcctgtggtcatgcagatggcttcttttccttcttcctgatagaatcctcttcctgccacacagatcaagcatcttttattttaagaaatttttctatttttcgttcaaaaacatattctgtagctgatgacaaatcagaccgaaaaaaatagccaagtctgtcaaatttctgaatctccactggattctcaatattattttctgccatgaatctgaccatttcaccacgagccatcttggcatatgtaccttttgttaccagtttatctccggataactcacaaaatgtaaccgtaatatatctatcctgcggtgtcagatacttttctatacattttgagtattcttttgatgccagattaatgataattctgctgtcatcgattactgagcggtataacaagtctccccagtactcatacagattttttgcatctccaattccgacctttgcctgcatttctaaacgataaggtgtcacaccatccattggtttcagaaccccataaaatgcagacagtattctcaaatgattttgcacatactcaaactgcatatcttcaaacacagatggtgccatatatcgaaaagcaattccttcatatgataagacagccggagtgagcatctgataaaggttcatattttccagtctataaaaattctgttccagaatcttgtcattgcatttccagataactttcagttcctcttttgacctatctttcaaccagtttaatatctctgttgtcttatcaataaactccggtaaagcagccggttctatactgtcagcgtccgtaatcatcttctttgcaggcgataatataatcttcattaatttaattccttaaacatattttccggatcatctgccgccttgactttatcattagctttgatgataactccctgctcgtcaataagatatgttgttcttaccacacccatagaaacttttccatagtttttcttttctttccaaacatcatatgcttcaataactttacgctccggatctgctaaaagcgtaaatgccagtccatatttttcttcaaatctcttgtgagaggctacagaatccttacttactccgagaataaccgcacctttttccgtaaactggggataacgctcagaaaaaccacatgcctgcttcgtacatcccggtgtattatcttttggataaaaatataaaatcacttttttgcctgcataatcgcttaatttatgcatttctccattttgatccggcaattcaaaatctggtgctttagttcctacttctaacatacgttatttctccacttctttcacttctatctgttttcttgtcctcttatttcccgaaatcattttatgaccagaataaactgccataatcatgcatatcagagagccaaacgcaaagtatttgtgtgttgcttttaaccctttatatccggtataaaaagttccaaccattgtaactactgctccgaatgaccaatatttatgtgctttcatgctttattcacctcctgtatatgaacatattatatcaacttttttgtaacatagtctatattttcctgaatgacaccatctcttatcggctgattatactatatcttttatctatactactatggtagggtaattttgtgcaaatttcagtatttgctcatttatagttaaaaaactctttttcttcataccacaccggtatatttcttttaaaatagtcataatcttcaaatgccaccttgcatctttcaaccattccatctatgtctgattgcccgaatttttctgcccattttatcgaaaatagagaggcatgtgccacatacactgcaagaatactccaaaaatctcctggaacttcatcattaaaataagcctgtatctgacctatacaatatggaacacttaattctctggcaaagctctccaatttataaaactcttcgtacgggtcgcctacttcccaacgattaaaatctattacacctatttcgccattttccatatatatcagattccctgggtgaaagtctccatgttgatatactggtttttctttccatatcttttgtatattatctttcacatatttaactgcaatttcatctcctgcaattctgacgcttgatgcctcatatctcgaaagctgtaaccgtttcttatccatcttggtgttaacaggaatatctttttcttccacaggtatactatgtatttttctcaaaatatctcccgcttgtcgccctaatagatactgctcattctcagataaacgttgcaaaacagtttccaaatcttgtccttctacccaagtcaaaatcatatagacatttctattttgattacatattccaaattcaaccggcattgacattggaatatccaattttgaatacttggtaataatatcaaactcttttttcttttcatcatatttatcaatatccgctatgcgaagcaataatacttctccctttttagtatgtgttttatatttcaggtctgccgaccagccctttgtaattttgtgaatcttcttccactccttactttgagctatgtcattccatggttgtctccttttccactcctcaatcagcttcggctgaatcaatggatatgtccaattctctggcaattcatccataagttcaaccttctctatctcactttctaacttgcctgaaaactcatttatttcagcaaaacataacaatccaaaagattcctcacctgtttcattcacgctattttttccagttacggaatatacacaaagaggctcaatgtcaaactttacagctcctgtttcttcctgaagttctctttttgcagtatctaaaatatcttctccttcttcgcgatgtcctcctggaacttcatatgtatcacgttctttatgtttacagaatatccactttccattactctgggaaataatcactgcaaacttcaacaatacgtcgtctactgtatcataaaattttacttccaacatatcatcaagcctccaacatcaacaactaattcagatttaaaactcttttaaagaattctaaaaaaaccatcttctacagccatctgttctaatttatcttcaggcaaatcgtaataatgtgtcaagctgaggattgtacatcatagctctattctgccttgctgcaacatactgctcactgccgccccggttgccgcttcttcttcgcattctgccagcaccagtttcgcgccaaacatttcttctacgatctcgcagagaaccggattctttcgcaagccatttccggaaccgatcatgcgttttatgttcattccggttccgttttgaatcgtctgatacatctgatagagttctctgctcattccctcgagcgtcccataaacaaacgctgccggtgtgaaattgtccgcgcagagattggtaatacttccactttgctccggatgtactctggttccgtcaaatgttgtttctatctgaagtttctgtttttcctcttttcccgcacaggatgcttttccgtctcttgccagtttctctaatgttttatatagcggttcatcctgaccggttgccgctttcacaaattctctgaagaatttttccaacagcgcataggcttttcctccgcacagtgaggatcctgcaagcaggtaagcaccatgtaagaaaggtcttgcttcgattccctccgccgtaaaatactgatcggaaagcactgaaatctgtccgccggttcccatatttaccagcaatgtatttttttcatttcctgctgcgccgagaaaactcgcctgattgtcgccgattgctgtggtcacaatgcgttctctgtaacttcccagtgcttcgattccggtgcagactttcggaagccacggttcttccacgcccattttgtaaagttcttctgtcataaaagtatttttctgtgcatcaaagaatccaaaacttgcagcattacttgcatgaaccagtacttcttttcttcctgtcagctgcattccgaagtaatccatgatcgtacagaaactcactgccgtatccgggatcagattgtgtcttaaattataaatatgtgtgaccatcccataaccggaagctgcctgcaccttacatgtctgctgaatctcttccgtcagggaaccgttcttctcctcacaaagacttcctctcgcatcctgccaggtatacagcggactgacgcaggttccttctttgtcaatatacacgatcccatgcatctgtccggtaagtccgatcttttccacttccggatatctgtccagaaaatcgtccagcatctgtctgctcttctttacgatattttctgcatcctggattctttcccagtcactgtccgttgcgagaaagcttccgttttctattgtttttgcctcaagaatccgagctttttgtgtttcgtttttttccagaaccacaccactgatggttgttgttccgatatcaattcctattgttttcataactattatgctccattaattttctgtgaacttaatacaatactcgccttagtataaatgaacgttcttctccacaagcttatcaccttcgtatcgcaatttcagtgagaaaaagcgttcctcaccggaaagaagcatttccaggaacacactgtccccttcccaggtcggcagtttgggcacctccgctttgtccacccagcagagatccccctcgtcacattcgatcagttctccggtgtatccgtcggctgtgaatacgcacatcagttccgcttcacatgcatcactgataaaagttaccactccgcgaaacctgtacgaggtaagtatcagcccggtctcttcttttacctcacgcaccagacattcttccggtgcttcctgtccttctgcgtgtccgccgacaccgatccatttgccctcattgatatcgtttttctttttcactctgtggagcatcagatatttgccttcgttttctatgtaacataaagtcgttgttgtcattttttctttctcctgtgtttcttatcctttggacgcatagagaggattggcattcctgaccacatactcatcccgcaatgcatcaaatgcctgttttaccctatccggaatatcgacatgtgcaataaaatcctttcccgcaggaccatacccattttcatcatccgtcagtctcggaatctctcccagtaacagactcacatacctttccatgtcccacattccccatatttttttttcatatgtaagcacatgattcctctctgttactttcgctgcatacactgcataattaatgatctgcacctcatcttccacatattttcgcaaacctgcctccattcggcgctgcatcgtggcgtcctgggaaagaatgatacttttaaaggaaattccctgctttttgagtaaatccagcagatacgtaatattatttctgcagtttgtcgactcacattccaggaagtcggcttccagtccgtatcgatgtttcagatacccggcaaatacctgtgcttccggtaactcatctgtctcaatctccgggaattctttgtgcatcttttttcgtaatgtctctgtcgtatgtcccgcaccaccgacgatcacatacgtttttgctacccggttcttcatcgcctgtgccagcacattcccgccgcacagtatacttccgccgaaaagcaccatcacatcagcctgtgtgatcccacaggtatcttgaagctgtttctgtgtcagttccgaaacatctcgtttcccgcaaaatcctcccaatatatttatattttttgcaatatctttcatcttctctcctccactatactttctccagctgctgcaacacccaggcaaatgctctggctgtccgcacctccggttctttgaaatgtcctcccggattccattccaggatacatggtacactttcctctttcagccacgcaaaaccgtcccgtatgcagtctccgacctgcgccatcaccggatttcttgttttttcttctttatcaccaagactcagataaatacagtcactctgcacccgtcggctcttcatctcttccaggaatcccggaaaccagacggatggagatactgctgcgacacctgaaaaacgatccgtctgacctgctgcccacagagcaaataatcctgccatcgaatatcctccgatacagtatttccgttctttatccatacacagtttcagcacttcttccaacgtctttgccgcaccatcgccaaaatcttcttttccaaacaccgccggtgctttccatggtgaaagatcatgattccagttatttactttgaccgcaacaagttcaaaatcctgctccgttctctttcgaatctcccggatctccttttctattccgggaagatcgtgctctcccaccatctgaatcagcacagccggtgccagacagtttccatattgatatgtaatcattgcttctcccctgcctttttgttgtacttattatatcgttttccttcttcattctcaatgtcaaatttttttcgtttttcttgaatccattgtcaaatgatgatatcatatattttcggtgcttctttctgcaccgccataccaacataccatatactatagattggaggacctatgacaaaagaaaatacttctgcccctgcagcagaaaataaaatgggaactatgcccatcggtaaacttttatttaatatgtcgttaccgatgatgatttccatgctcgtgcaggcactttacaacatcgttgacagtatcttcgtggcgaagctttccgagaatgcccttactgctgtttctcttgcctttcctttacagacattactgattgctgttgcaaccggtaccggtgtcggtatgaatgctctgctctccagatcactgggggaacataagtttaaagaagccaataagatcggtgtcaatgcagcttttctgtattttttaagttatcttgtatttttgattctgggatttaccgttgtaaaaccattttatgccagccagatcaaaggtgcggatgctgagatcatggagatgggcatcgaatatcttcgtaccgttatgattttctctttcggtttacttgcacagatttactttgaacgccttctaacctccaccggaaaaacacttttcagcatgacttcccagttatgcggagctcttaccaatatcattctggatccgatcatgatcttcggtctgctgggatgtccggccatgggtgtcaccggtgctgctgtggcaactgtcatcggtcagtgtgtcgctgctgtcgttgcctttacctgcaatcacaaattcaatacagagattaagatccattttcagggatttcgtccggatatcaaaatcatcggaacgatctatgcgatcggtgttccttcgatcatcatgcagtctatcggctctgtgatgacgtactccatgaaccggatcctgattgctttctcatccacagcaaccgctgtgttcggtgtatatttcaagcttcagagtttcttcttcatgccggtgttcggtctgaataatggtatcacaccgatcatcgccttcaactacggggcacagaacagaaaacgtatgatcaaaacgatcaaactcagcctgatcactgctttctgtctgacctttgtcggattcttatcttttgagctgattccacaggttcttcttggaatgttcaatgcttccgaagatatgctcgccatcggtatacctgcactgcgtatcatcggggttcattatctgatcgcctggttctgtatcatctgcggaacagtatttcaggctctcggaaaagcagtatacagcatgatcgtatcgatccttcgtcagctcgtggtcctgatcccggtagcctaccttctttcccggatcggaggactgcatgtggtatggtggtgcttcccgattgcagaggttgcatctcttgttgtttcactgactttcctgttcagtgtcaaccgacagattatttctaaaataccggatggcagtgacattctgtaaaatacatgcatttactatacttgtaaaaaatatcccctttcacaaaaatttttctttcgtgaaaggggatatttttatcctatccggatactatatcaaagaatttgtgcaaatgctcaaggcttgttttgaaacagcataaatccattggtgtcaggcacctttacaccggacgcattgaatacaagaccaacttccacctttagtcttttgattgattgacaattaccgaactattcccgtatatttaactcataaagcagatacaaaatcccagatgtacaggtgaacagagatgaaaaatatccatagcattgaattttatactggaagcaaggaagaattgcttccaggttttgaaaaagattttccctatatcgcttcgagggcagaacttgacaaatatatagggtgttatgtaccgtggcactggcacaggacagtggaacttttttatatggaaagcggcagcattgaatatgatacgccaggaggaaaaatattgtttccggctggaagcggcggcatgataaatcccaatgtactccatatgacaaaagcaatatcgcagaaagaaaagaatatacagctacttcatattttcaacgtttccttacttgccggagaacagggaagcaggattgaacaaaaatatattacacctgtcataacagccccgaagattgagataatcccgctttttccgggcaattcagaagaagatagaattttgaaactgcttgctgcctcattttgtttgtccagtgatgaatttggatatgaaataaaactgcgggaagccctaacggaaatatggctcatgcttttcgaactttctcgttctatgcgtgaaaagaaaggggaacataacaaaagcaacgataaaataaagctgatgatgatatatattcatgaacattacagagaaaaaatatctattccggaacttgctgcggcagcatatttaagcgaaagagaatgttatagagtgttccatgactgtctgcacatgacacccgtcgagtatataacaacttaccgtttacaagttgcctgtcagatgttggcaaaggggcaggaagctgttactgttatcagtcatgagtgtggtttagggagcagcagttattttggaaagatttttcgggaatacgcacattgttcacctacagaatatagaaaaaaatggcagaatagtgataattaatggcggaaaaaaaatattttttctattacttttgcattataatgatacctgtaaagaaaatcagcaatttacaggagtaaatatttcattataaaggagccaggcattttattttccagccccgcccttttgaaaggagttaaaaatggagttgaacattcagaccgcagaactggcattaaaggaagcgtcagagtccaatccgggagcatgggcagatcattcccggtttgtagccgaagcctgtaaaaacattgcatcacattgtaaagatttatcttctgaacaggcatatattttcgggctgttgcatgatattggacgctatgccggagtgagttcggaaaagcatctgatagacggctatcggtactgtatggagcgcggatgggaaaaagccgcacagatatgtatatcccacgcatttatgattcaggatattgccacatctatcggtgtatttgatgtcagtgatgaggattacctgtttatgaaagaatttgttgcaaatgcggtatatgatgattatgaccgtcttgtacagttatgtgacgcattggctatgccgacggggttctgtcttttggaaaagagatttgtagacgtgacaatacggtacggtgttcacacggcgacaatagacaggtggaaaaagattttagagattaaagaacagtttgaaaatcagatcggctgttcaatctattctctgcttccgggtattgtggaaaacagttttcgttaaggggggatattatgtattacgaatccagtgattttttggaaactgcggacagcgatacattaaagcagattgcccgcacaagggaattaacacgggaatattatttttctgattatggagatgtagaaaaacgcacttccattcttcgggaactgttgggtggaataggggaaaatgtggtaatcgacacgccttttcactgtgattatgggaaaaatatatttttgggaaatgatgtgataatcaatatgaattgtacctttgtggataacaaaacgatccgaattggtgacagggtattgatcgcgtcaaatgtgcagatgtatacatcttcgcaccctgtattgccacaggaaaggcttgtgccggattggagggaacgcaagacaacatttttcagaacctatgcacgtccgatagagatagaaaacaatgtctggattggcggcggctgtattcttcttcccggagtcactataggagaaaacagcgtgataggggctggaagcgtagttacccgccctgtccctcctaattgtgttgcagtagggaatccatgcagggtaatacgttattttgatgcggatagggaaaggtagcagcatgaagtatgtcctattatagcatgcagcaaaagaaaatatctcatgaatctctcttatccgctaattctctccgatagtatctgtaaaataaactccccgtcgtacaaacagccacaaaattcgcaatcggctcagccaaaatatgcaaagcaggcaaagataggttcgaagcgatatcacattgctgtttaattctatttttttacttcttttcctgcattgttcctgcatttttaaagatttttcaaaatcagcgaaataccggacagtaccagcaataccgatgtaatcttcttaacattttttccatccatatgattgctgcatttgatttccaaaaacagccccaaaaatgcaaacggaatcagtttcaagacggacagaaccgtatcaaacgtaagtaatccaagtgcactgtacaaaataatgcgaaatgtgttgtccacaataaagaccgcgctgatatttgccttaaatgagctgtcctcgtccgtcacgcgattgacgtaagcggccagcaaagcgcccacaccaaagagaccgcacaaaaccccggctgccacaccgatgatcgccagcaccagccgggaggaaggtacgcgttttttgctgtactctctggaaagcatctccgcacccagtgcgactactaccactccaaataccagcttgatcgctctggcatccacatttttcaacagaaatgctccgggaatactgcctgccagtaccaggactgccaacgggatatacactttcggatccagattttttcggtttttccaggtaagaatcacattggccggataacccaacagcagatcaattggagaaatattggcatttaccgatccaaaactgagaattgctgtaaataccagcgtgttggcaaagccacacaaacctttgataaaataagcgacgactgccgcaagcatccataaatacatcctattatctctttcaggcttttttgaaatatttttttatttttcggaaaaaattacttttcgtcaacgacctggaaaataaaaaattttaaataatacgactcatctgccgcccacaggatcggatgatccggggactgagtgcggaattccacctggcggagacgtttatgagcgcttcttgcagcttcccgaaccgttttcgcaaggagttcctgggtcataaaatgggaacaggagcaggtggcaaggtagccgccgtctttgaccagtttcagtcctttgatattgatctcgcggtaacctttgatagcgtttttgatggcctggcgggatttggtaaatgcaggaggatccaggatcacgacatcgtatttctctcctgcttctgccaggcgtggaagttcgtcaaatacattcgcacagcggaaggtgaccctgtcttccagtccgtttctttttgcattttccgttgcctgggaaacggcatactcagagatatccagcccggttacctctgtggctccggcaattccggcgttcagggcaaatgttcccatatgggtaaagcagtccagcacccgttttcccttgcagatgcgctgcatcgccagacggttgtacttctgatccaggaagaatccggttttctgtccattttccacatctaccagataatgtactccattttccacgatctccacttccgttttatacggctccccgatccatccttttactttaggaagtccttcttttttccgctcgttggcatcgcttcgctcaaagacaccgtggatgatcacgccgtcttccgccagcacttcttttaacagtttcacgatggtttctttgaatgcttccatgcccagtgccagacactccaccaccagcacatcctcgtatttgtccacggtcagtccgggaagaaaatctgcttcaccgaagatcagacgacaggatgaggtatccactgtagtttttcggtattcccatgcattttttacacgcatccttaaaaatgattcgtcaatctcctgatgaatgtttctggtcatcattcgaactctgatcttggaattctgattgatgaatccccgtcccatggggtagccatcaaagtcgtgtaccagcacaagtgaaccgttgtcaaatcctccggtgatactctcgatctcattatcaaatatccaggccccgcctgctttcagtgtacgtccctctccttttttcagtgtaactactgcgtaactcatattttttccctttctttgcttctgtatcctctgtctgttatttttgtcgttgttttgtcatatcgtaactgttcagtaccttcacagttacgagccaaaatgcatttaaaatcaccttcggtgatggcattttggcttgtatgtctcgggattttggcatattcatgccaaaacacctcgcggtacagtgactactgaatagttacgtcatatccattcttccgtacctgttttacagaatctcctttattttcactttctgattccggaaaccttttttccagatcatcacataatattttccttcaacagaatctctcgataccgtaaacggttcttcccggaagatatccaccctgtatcctttttcttcccattctcttgcacagtcctgcgcccgttttttctgctcccgaaactttttttcttcttttcctgaaaattttcgttccggatagtattttgccgcctgtcgtacctgctgttgcaaaagctgcaccacttttctgtgttttgttctgtgaagctgcatggctatatatcttgccagtattttcaccgggaacattgcatacagacgcaccagtctcaacagctgtttatcaccggtttccttcagcagttcttccataacggacaaagcctgtccggctggtttccaggcattttctctctccacgagatattctttgctgattgccggataacaggtataattcaacggtggaaaatccgccagagctgccagtttctgctcccgtctgttacaatatctttctcccagatactcccgtttgtcacgtataatggcaaacgtatactccagctgacgcagatattcatatctctttacccagaaatgaccgattgttccataattatacaggtgaacttcttcttccaaaccggtaaacatcagagtgcataccgaatcaccctgatgcaccacaaggatatatttatttttttcagaatggtttccgaaccctgtttctgatttcacattttcttctttatattcccgcagttccgtttcaatcttaccttcataatctgccagatattctccggtcatccgacagtttttaagaacaagaaaactttccacagcatcattcatcagatagatcagtcgataagagattcttccctctgtcttttcttccagaagctcaaattccccctgttccagtaatagtttcagtttttccacgggatctgcaagtatttcttcctgttttttcacatttactctcctcgttttctgtatcggttattttcaatccacggtcggtaatttcacagagtccgacatgtcgggaataccgacgttgcttgacctcatatcagtaggggataccgatttttctccgcccgctactgccgtttcatttctttttgataatttctcccctaccttcgtttatacttagaggtaggagattccttatttatttgtttgttaaacattcctatttcttctgttatatcatgatcttcattcgccgctcccgatgaacaaacttcgtttgttcccgctcgctaacgctcattatatcatattttttaatatgagaatagccggacgcaaaaacagatccggaaaaccatttatcggtttccggatctgttttacttccagacaatgttgcctggtctgatgtccttttttactggaaagcagcaatcagttctttggcatcatcgtatccctggttttccagttctttctgataccactcgtcgattccgtctactgcctttttgaaagagtcgatgtccatatcttcattctgtgtgatcgtcacgccgttttctttctgccagcggctcatgatctcgtcgtctccggcacggttgatctcacgttcgtagtcagtagccagttttccgcactcgtcaataacttcctgctgttccggtgtcagactattatagatatcaccattgatacagaagaacagacagtcataatttgcattccacagggagcagtatggctgtacttcctgt

SEQ ID NO: 647 - DNA, 429534 bp, Oliverpabstia intestinalis
  source 1..429534: mol_type = genomic DNA
ttcccctgcccgttccgtcttgctctgctggatgtcggctgagactggatgctacggttgtatgttccttcaaggtgattgtaagtgtagaatgttgtacttttttaatctcaggtgataaggcttagattatttttatattttctatgtttttattttctttttttacaactactaattgattgatacataacaaccgatcccatccttctacaattttcctcagaaacaaaatttctgatagcttttattgcaagaatctgtttctgcttttcctcttccacccctctgctctttaggttggtttatttcgcgaagagttttttgaagcggttcatggcttctacagtggattcgtaggttccgaaggaggtcaggcggaagtagtttttgccgttttcgccgaatccggcacccggggttcctaccacctggatgttttcaagtaagtagtcgaagcaggtccaggagtccatgccgttcgggcactcgaaccagatgtatggggagtggataccaccgtagaacaggatctgaagttctgtcagggtgtctgcgatgactttggcattctttttgtagtagttcaggttttcctggcattctttgattccttcttctgagaagatggctgctgccgcgttctgtacgatgtaggaggttccgttgtatttggtgctctgacggcggttccacattgcgttcagggacatttctcttccatcggaggaggtaaataccagttctttcggaactacggtgtagccgcagcgtgttccggtgaagccggcggttttggacagggagcagaactcgatggcgcattttctggctccttcaatagtatagatgcttcttggcagttccggatcggaaatgaaagcttcatatgcggaatcgtacaggattacggcttcgttttccagtgcgtagtctacccattctttcagctgttctttgttatagcatgctccggtggggttgttcggagagcagatgtagataacatctacatgctggctgtggtccggcatcggaaggaaatcgttgtctgcattaccgctgatatacgttactttatttccgcacatggtattggaatccacatataccgggtagaccggatccggaatcaggatcacattgtcgtgaccgaaaagctcggtgatgtttcctgtatcacttttggctccgtcagaaataaagatcgcatctgcatccacttccacgccgtttcttttataataagctgcgatggcatctcttgtttttgcatatccttgttccggaccgtaacctttgaaagtagcagactgtcccatctcgtctacgctctcatgaagcgctttgatggcacattcgcacagcggacgggtaacatcaccgattcccagtcggatcaccggtttgtccggatgtttttcgctgtaagcagcggtacggtgtgcaatctctgagaaaagatagctgtcttttaactgcagataattttcatttaactttggcatgattgttgttcctttccttacgctttttcacatttttataattttttccgaagcagttcgttgaccattcccgggtctgctttgccacgcatctttttcataacctgaccaaccaggaaaccaaggactttttcttttccactgtggaattcttccacggtcttgggattctccgcaagtacctgatcaactgctccttcgatggcgccgctgtcagataccatcaggagtccttctttttccatgtatgccagtggctccacatcgtcttccaggatctttgcaaatacttttttcgcatttgcctgattgatttttcctccttcgaccgcctggatcaggtctgccaggtgtttcggggtaaagtccatatcttcggcttccattcctttttctttcagcagccgcagcccctctcccatcagccagttggctgtctttttcgggtttccgcacagatcggcggtctgttcgaacatatctgccatatgtttggtctgggtcagaatggaggcatcatatgccggaagaccgtactgttcttcgtatcgggctgcgcgttcttcctgaaattccggctgacggcttcggatctgttccatccattccgttggaatctgcatcggctgcagatccggatctggaaaataacggtagtcttttgcatcttccttagaacgcatcgcatgggaggattctttgttatcgtcccagcggcgggtctcctgaatgacttcttttccttcttccaacagttcgatctgacgttctctctcaccctcgattgcatgggtgatcgctttgaaagagttcaggttcttcatctcggtacgggttcccatacgatcgcttcccacctctcttacggagagattgacgtcggcacgcatggagccttcctgtaatttacagtcggagataccaagatactgacagatcatacgcagcttttccagataagcaataacctcttgggctgtacgcatatccggctcggatacgatctcgatcagcgggacaccgcttcgattataatctaccagagagcagtcttcccattcatcatggatcagctttccggcatcctcttccatatgcatctcgtgtatccgaatggtttttttgccgttttctgttgtgatctccagatgtccatcgtgacagatcggcagatataactgggaaatctgatagttttgcggattatccggatagaaatagtttttccggtcaaaccggcagtaccggttgatctcacagtttgcagccattccaagtgcaagtgcatattccactacttttttatttaataccgggagggatcctggcataccggtacaaaccgggcaggtatgggtattcggtgctgcaccaaactttgtggagcatccgcaaaaaattttcgttgccgtggcaagttctacgtgaacttccagaccgatcacggtttcatactgttttgccatttatttttcctcctttgcccaggctttggggaattctccccgcagttgttcgtaagcggctgctgcccggagtatcttcttttcctggaagcagtcaccgatcagctgcataccgatcggcagtcccctgctgtccataccgcatggaaggctgacggccggaagacctgccaggttcacggccacggtgtagatatcactcaggtacatctgcagcggatcacttaaactggtgccgatcttcggggcagtggtcggagaagccggagccaggatgcagtcgtatttctggaatgctttgtcaaattctttcttgatcaggcctttggcacgcagtgctttcatataataggcatcgtagtaaccggcactcagtacgaaagatcccagaaggattcttcgttttacttcctcgccgaagccttccgcacgactctttttgtacatttcatgcagttctgtcgcacccggggtacggtagccgtattttacaccgtcgaaacgctccaggttggagcttgcttccgcacaggcgatgatataatatgccggaattacataatctaccattcccagggagaagaattctactacagcaccgtttttactcaaggtatgaacggcatctgccagagcttttttcacttcttcgtcacagccttctgccagatattcttttggaataccgatgcgcatgccgcttaatccaccggataccaggctatcataagattccaccggtacatcggcgctggtgctgtctttgctgtcatgtcctgcgataatctcaaaaagagctgcacagtcttttacatttttaccgatcggtccgatctgatccagagaggatgcataagcgatcagaccataacgggatactcttccgtaagtcggtttcagtccggtcacaccacagtaggctgccggctgacggatggaaccaccggtatcggaaccgagtgccattaccgcttctcccgctgccacagccgcgcaggaaccgccggaagagccacccggtacatgttccggattccaggggtttctggtaacgccgaaagcggaagtctctgtcgtacttcccatagcgaattcatccatattcgtttttccaaggataaccattccggcatcttctaactgcttcactgcctgtgcatcataggtcggcacaaagtttttcagcatttttgaagaacaggtggttttctgtcctctggtacagatattatctttcacagcgatcggtacacctgccagcggaccggtgtatctgccgcttttgattccttcttctacttctttgatccgatgagccagaatcttttcatccatggaaacataagcatgtacctgtgactctgacttctgtatctgttttttgcaggcttccactgcttcttttacactgatggagccgtgccggatctgttttgacagttccagcgcagacatctgtaagatttcttccattgcttcttcctcctgctatacggtctttggtacgatatactgatcttcttttgccttcggggcatttgccagagagtcttttctgccgtccccgttggtcacctggtcttcccggaagacattcacctccggtaagatatgtaccagcggctctgcctgatccgtatccagttcatttaatttttccacataggtcaggattttttccatctcatccatggctttctgtctctcctgtggcgtcagcgccagttttgcaaggatctctacgttatccatggttgcttcatctatttttctctcgctcattccctgactcctttctgccgtcttacggctccagtctgctcatatctctcgggaataagcaggcttctcttacattatcttctcccagtaactgcatggtcagtcgttccagaccgatacccagtccaccgtgtggcggcataccgaagcggaacgcatccagatactgttccaggccttcttctgtcatacctttctcctggatcttctcttccagcatggacagatcgtggatacgctgtcctccggtggtgatctctagaccatgatacagcaggtcaaagcttaacgtataacgggtatcctccggatcatccatcgcatagaacggacgttttttactcggatagtgtgtcacaaatacaaaatctgcattgtattcttctttgaaatattttccgatcagttcctcttcttccggttccaggtcgaaagggtttctgatctttctgttgtatttttcggaaaccaggcgtttcgcttcatcaaagcggacataagggatcttttccacatccggcagtgtgatgttcagaagtttcaactctttgttgtactctttttccagcaggttcatcgtatactgcaggaagccggtttccatcgcacaaatatcaaggaaactgtggatatatcccatctcaaagtccagactggtgtattcattcagatgtcttctggtgttgtgcttttctgcacggaataccggaccggtttcaaagacacggtcaaatacaccgaccatcatctgtttatataactgaggactctgctgcagaaccgccggtctgtgaaaataagaaagccggaacatgtttgcaccaccctcagcactctttgcaccgatctttggtgtgtggatctcggtaaatccctgctcatagaggaaatcacggaagcctcgaacgattccttcctgaatacggaatcttgcccgttctctgatatttctcaaagaaagggaacgacggtctaattttgcttccagagaagtgtttaatttccatttgtcaatgggaagtggcaatggacaggatacgtgagacaggtgacggatggtggacagccgtacttctttcccatggggagcacgctcttcgtctttgatctgaccggtcacatggatgtaatctccctctctgatctcagaaagttccatatctgtctttccttcttcccatacggtctggatcagtccttccctttttctcaaaatcacaaatgcgatttcacccatatcacggatgctgtgcactgccccttccagaataatcgttgttccttcctctgctttcagcagatcttctacttctgcttcttcctgttgttttaatcctgtaatgaattccatatcacattctccttttcatgcaatttccgtcagccttcttcaaacagtaatgtcaggatcatctgtgctgtctctaccatgttggttccattatccatgctgcttttttgaatatagcgatgagcctcctcttcactcagatgattacgttccattaaaagtactttcgcattttttatataattgtcttcccgttcactgcgccgtttcggctttctggctttctttgccatccgttccatctggtgcagtaccatctctgcagtattgaccagatcatagacctttaacggtgtggtaagagataagattccggtgtctgccgcactgacagtactggcagatcccagaagaaccagttcgaagtgaggaggaaggctgtcagcgagttccgtataatacatatctttcagatgatacccgctgatcaccattcccgactcatgttccctgatctccgaaagagcagcggaagcggtagcataagcaaatacctgtggaaatccatgtcccatcaggatcttacggattttctttgcgtcttccatctttggtaagacgattaccaccacactcatcagctgcctcccttatctatacgcgataaagataccggttcagttcccattcggacacttgttccagataatctttccattcttttcgtttggccttcatatatcctttacggtatgtttctcccagaacttttgatacaagagtatcctgtcccatggctttgatggcctccccaagattttccggcagcatctggattccaagaagttttttctcttcttcattcaggttccggatatccttggtaagttcttccggaacctgaagtcctttttcaataccttccatacctgctgccagacacaaggcaaataccagatacggattagacgcggagtccggactgcgaagttccagattcacttctccaccatgttcttttctcacatggaccagtgcatttctctgtgttcttgaccaggtcacttctgaaggtgcctcgaatccgggaaccagccgtttataagaattcaccagtggattcattaccgcagtcataccctgtatatgatacaggatacccgcaagaaatgcttcaccttctgcacttaatgctccatcctcacctttgaatatattctttccgtctttcaacagccgcatgttcagatgcatgccggaaccattaacttctgcccgtggtttcggcataaaagttgcatggagaccgtaacgctttgcaattgtacggactgccatcttaaaagtcatgatcttatctgcagtggccatcgcattttcataggtaaaatcaatttcatgctgtgccggagaaatctcatgatgggaggaatcgatctcatatcccatctcttctaatgtaagaatgatatctcttctcgtattttctcccagatcaataggggaagtatccagataaccggccttttcatgcgtcagcgtggttggcattccattgtcatcggtatgaaacaggaagaattcgcactccggattgaccttcagtgtgtaccctttttcctgtgccttttttactactctttttaaaatagatctcggactgtcctcaatctctgtgccatcttctctgcacacatcacagagaaaacgagcaaccttcccctgctggggtctccatggcagaatggaaaacgtgctcagatccggtttcagatacagatcacattcttccccaccggtaaatccatccagggatgcagtatcgatggtacaacggttttccatagctttgatcagtctgctgctcgggattgccacattttttaatactccaaacatatctgtaaactgcaggcggatgaattctacatcttcttcctccaccatctgcagaatctccgatttactataattctccatattgttctcctttttcttacgcatatattatcagttatgttctgtcattccaaaggatgctattgcaagctgttcggcagtttcacgttactgtctgctgaacagttacgtttttcacaactcaaaaagggcgaccttatccagagtttcccctccggataagacgcccttgccttttatgttccgtattatagcaatcggactttctcttgtcaatacttcattaaaaattttacaggtttgtatatcccatcagggatcgatccacggctttcgctgcctctcttccttcccggatagcccatacaaccagtgactgaccgcggtgcatgtcaccggcggtgaaaacacccggaacgctggtttcgtattcgtccggttttgtcagaacattggttctcgggttcagatcgattttgaaggcatcggtgacgtatttctggcttcccagaaaaccggctgcgatcaataccagctgcgcatctataactttctcactttcctcaacgggaaccatcatcatacgtccgctcttttcatcttttttaggctccaggctgacgatcactgcttttttcacgtttccgtttttatctttctggaattcttttaccgttgttttatagattcgcggatcctgaccgaagactgcgatagcttcttcctgaccgtaatcagttttcagtaccttcggccactccggccacgggttggatggcagtcgctccacggacggttttggcatcatctctagctgtgtgacggattttgctccctggcggacagcggtacccacacagtcgttaccggtatcaccaccaccgatgactaacacgtgttttccttttgcagagattgcctttccatctgcaaatcctgaatccagcaggctcttggtcacagaagaaagatattccactgcgaagtaaatattgccactctctcttcccggcacattgatatccctggggttggaagctccgcatgccaggatcacacggtcaaactgtcttttcagttcttctgccgtgatatcttttcccacatccacaccggtcttaaattccacaccttcggctttcatcagctcgattctgcgatccagaatctttttatccagcttcatgttgggaataccataacggagcagtccaccgatccggtcatggcgttcgaaaacggtcacactgtgtcctctgcggtttaactgctgcgctgctgccagtccggaaggaccacttcctactaccgccactttctttccggtacggatcttcggggtctgtggctgtacccagcccatctcgtaagcatgttcgatgatggcacgctcattttcctttgtggataccggttttccgttcagattacaggtacatgccgcctcgcagagtgcagggcagacacggctggtaaactccgggaaactgtgtgtttttgtaagtctttcataggcctgtttccagttgccgctgtacaccagatcattggtttccggtaccagattatgcaacggacagcccgaagccatgccggctaacatggctccgttctggcagaaaggaacgccacactccatacagcgtgctccctgtttctgctgttcttctaaaggcagcggagtacggaattcgttaaaatgacggattcgtttcaaaggttcctctactgctgcgttttttctttcatattccaaaaatcctgtcgcttttcccatttttcttactcctccgtcgatttggtctggaaactttcatagaatgcttccatctgtgcctgctctgtgctcattcctttctcttccagctttgcagaaagagcgatcatcttcttgaaatcattcgggatgatctttttgaatttgggcagatactcctggaaatgctccagaatcaacgcacctctctcggatcctgtggcttccacatgttcctcgatcagttctttcagttctttgatatcgtatttgttttccactttttcaatggaaatcatatctttgttcagattccgatacagatggctgttctcatcgagtacataagcgataccaccgctcatacctgctgcaaagttctttcctgtcttaccaagaacgaccacgcggccaccggtcatatattcacatccatgttctcccacaccctctacaactgcgtaggctccggagttacggactgcaaaacgttcccctgccacaccattgataaatactttaccgctggtggctccatacagggccacgttaccggcgatgatattctcttctgctttgtatcctctgttcttcggcgggaagacaaccagttttccaccggaaagtccttttccataataatcgttggtatcaccgcacaggcgcagtgtcagtcctttcgggataaatgccccgaagctctgtccgccggcaccggtacagttgatggtaatagtgtcttccggcagtccgtctttgtgctgacgggtgatctctgcaccgaggatcgtaccgaaagaacggtcggtgttgccgactttcagatccagagaagctttcgttcccttctctacggatttctccagtttctttaacagtactttctcatccagcgttttttccagctggaaatcgtatactttttccggactgaacgtaacacactctttttctcccgcatatgggttgtacaggatctgagacagatccatctttgctgccatcggtgtttttgcgtcttcttttactttcagaaggtcacttcttcctaccatctcatcgatcgtgcgaacacccagttttgccatatattcccgcagctcctgagcgataaagcgcatgaagttctctacgtattccggttttcctttgaagcgttttctcagttccggattctgggtagccacacctaccgggcaggtatccaggttgcagactctcatcatcacgcagcccatggttaccaacggagcggttgcaaaaccgaactcttccgcaccgagcagtgctgcgatagccacatcacggccgctcatcagtttaccgtctgtctcgatccggacacggtttctcaggccattctgtaacagagtctgatgggtctctgcaagtcccatctcccatggaagacctgcgttgtggatagaactttccggagcggctccggtacctccgtcgtatccggagatcaggataacctgtgcaccggctttggcaacacctgccgcaaccgtaccaacacctgcttctgaaaccagttttacggagattcctgcgtatttatttgcgtttttcaggtcgtagatcagctgtgccaggtcttcaatcgaataaatatcatgatgcggtggcggggagatcagactcacacccggtgtggaatgtctggtctttgcaatccacggatatacttttttcgccggaagatgtccgccttcaccgggttttgcaccctgcgccatcttgatctgaatctctcttgcacttaccagatatcggctggtaacaccaaaacgaccggatgctacctgtttgattgcagaacatctgtcattatcgcttcctgcggaatccagtctgtcatcactttcaccgccttcaccggtattggattttccatggagatgattcatggcgattgccagtgtctcatgggcttcctgagaaatagaaccataggacatggcaccggttttgaatcgttttacgatctcatccacgctttctacttcgtcgatcggcacaccattttccggataattaaagtccatcagacttctcagatagccgctctgttcttcgtctaccattgcagtatactgtttgaacatatcataacttccggtccaggtggactgctgcagcatatgaatggtctgtggattgtaacggtgttcttctccaccgcttcttcttttatgttttccaaggctgtccagtgtcagatcgctggccagtcccagcgggtcaaatgcctgggaatgtttctcatccacctgttttgcgatatcttccatagtgataccacccacgcggctgacggttccggagaaatatttgtcgataactttctgagagataccgatggcttcaaaaatcttcgcaccctggtaagactgaatagtggaaatacccatcttggaagcaatctttacgataccatgcaggattgctgcattgtaatcatccactgcggcataataatctttgtcaagcagtccttcttcgatcagttcccggatactgtcctgggccagatatgggttgactgcacatgcaccataacctaacagtgttgcaaaatgatggacttctctcggttctccggactccaggatcagggccagagatgtctgtttctttgtattgaccagatgctgatgtacggcagataccgctaacagggacggaatcggcacatggttttcatccacacctcggtcggaaagaaccagaatattggcaccgtctttgtatgctttatccacttccacaaacagacggtcgatcgcgcgttccagcttcgtactcttataataggtaatcggaacaactgctaccttgaatcccggtttgtgcatctgtttgatcttcagcatatccgtattggtcaggatcggattgttgatctttaatacctggcagttttccggtttttcctccagcagattaccctttttacctacatagatcgtggtgctggtgacgatctcctcacgtatcgcatcgatcggcgggttggttacctgggcaaataactgtttgaagtaatcaaataacggtctctgtttttcagaaagtactgccagtggtgtatccacacccatggctgcaattgactctccgccgttcaatgccatggtacggatagaattcttatattcttcataggtatagccgaatgctttctgcagctgttttctctgctctttaccgtattcttccacatgtttgttcgggatcttcagttcttttagttctaccagattgctgtcgagccattcaccgtacggctgtttggtcgcatagatttctttcagttcttcatcctgatagatttttccttttacagtatcgactaacagcatctttccagggtgcagacgctcttttaacacgatttcttcttccggtacttccagaacgccaacctcagaagccaggatcacatccccgctctttaatacataataacgggatggacgcagaccgttacggtcaagaaccgcaccgaccagatcaccgtcagaaaatacaatggaggcaggaccgtcccacggctccatcatagttgcataatattgatagaaatctctctcatcctgatccagtgttttattgttcgtccatggttccggaatggtgatcataactgccagtggaagtggcataccactcatgaccagaaattccagtgtattgtcaagcatggcagagtcagatcctctggtatctacaaccggcaggatcttatgcagctgatttttcagatgggaggattccatggtttcctcacgtgccagcatcttgtcggcattaccgcgaatagtgttgatctcaccgttgtgtacgataaagcggttcggatgcgctctctcccagctcgggttcgtgttggtactgaaacgggagtgtaccatggcgatggctgattcataatctttatcctgcagatctccgaagaaggtgcgcaactgtcctaccagaaacatacctttgtatacaatcgtacggctggacatggatactacatacgtattttcattactctgttcaaagacgcggcgggcgatgtacagtttccggtcaaattccagtcctttttccacacgggcaggttttttgatgaacgcctgcacgatgtgcggcatacagactctcgctttatgaccgagaacatccggataaaccggaacttcacggtaaccgagaagttccagaccttctttttccacgatgatctcgaacatcttctttgcctggttacatttcagttcatcctgtgggaagaagagctgggcgataccatactctctctcctctccgatcgcgatccccagtttgtcacattcttttttgaagaatttgtgggagatctgcagcaggatacctacaccgtctccggtctttccctctgcatcttttcctgcacgatgctccagattttctacgattttcaaagcattttctactgtggtgtggcttttgatgcctttactgttgatgaccgctccgataccacagttatcatgctcaaattgctgtcgatataaaccctgattttctttcatcacattttctcctctcactggtgatacgctactgctgcctggatcagtccacggaacagcggatgtgcgcggtttggtctggatttcagttccggatgtccctgggttcccacgaagaacggatggccgggaatctcaagcatctctacgatgcgtttgtccggtgacagtccggaaagtaccattccgttttcttccagttcctgtcgataatcgttattaacttcatagcgatgacgatgtctttcgctgatttcttcggttccgtataattctcttgccttgcttccttctttcaggatacatggataggcaccgaggcgaagagttccgcccaaatcttccacaccgttttgttccggcatcagcgcaatgaccggatgtgtggtttccggatccaactcgatgctgttggcatctttatagccgatcacatctctggcaaattctacaattgccatctgcataccaaggcagatgccaaggaacgggatcttttcttctcttgcatagcggatcgcttcaatctttccttccgtaccacgggttccgaaacctcccggtaccaggataccatccacgccttttaatttttcagctacattttccggtgtgatctcttcggaatctacccagcggatctttacgtttgcacgggctgcgattccgccgtgtttcagcgcttctaccacactcaggtaggcatcatgcagctggatgtattttccgaccattgcgatctccacttcgtggatcggatttctcagatcttctaccatctgtttccagtcggtcagatccggttccgggcaaggcagctgaagggattcacataccacctgtgccagatgttctttctccatggcaagcggtgcttcatacagatactccacatcgaggttctgcagtacatgattgaccggcacattacagaacagtgcgatcttggctttcatctcttccgagatctcatattcgctccgacataccagaacatccggccacaggcccattccctgcagttccttgacactctgctgcgttggttttgtcttcatctccccggatgctttcagatacggaatcagagtcacatggatcaaaaccgcattctcatgaccgatttcatgctgaaactgacggatggcctccagaaacggctggctttcgatatcacctaccgtaccacccacctcgatgattgctatgcggttatcatcctctgactttggtttataaaaacgatctttgatttcattagttatatgcgggattacctgtacggttcctccgccataatctccgtgacgttctttttgcagaacggaccagtagatttttccagttgtcacattggaatttttatccaggctctcatcaatgaatcgttcatagtgtcccagatccagatccgtctcggtaccgtcatccgtaacgaacacttccccatgctgaataggattcatcgtacccggatccacgttgatatatgggtcaaacttctgcatagtcactttatagcctctggctttcagaagtctcccaagcgaagctgccgtaattccctttccaagtccggatactacgccacctgtcacaaacacatattttactgccatcacattttcctcctcgtttgaaaaactatgagaaatacgttttccgaatttctcaggttgtcgcaacagtcgccaaggcctcatgcagccacatactttggctcgttgcttacgcaaaaaggcgtcagaaaccctttcggatctctgacgcctttgtcagtgctttttaatgctaatattatgtccctttccttttattttgtcaattcttttctgctgtttttttttgtttttcctttttgccctgtttttcgacagattttttccattatccgtacaacataaccatatcgaagttctattctccctctccggttgagtgtattatctccgattacttccagttttttcataaatgcagagactgtccgcatctcatagggctccagattctgctgtccatagatagatttttccagaatctcacatacgcgaagatatgcacctgcctctactctctgataattttcatgaattttctgatctacttcaccggttttccatccaaggctcatagatattccgagaaaagccggcaatttctgcatttcttctatatagatgtgtatagatgcggacttttttctgttgatctgcccgggcaaattttctgtgcatccactcatagtccaggattcttccgatctccagaatcccaaggcaaagaataaccagaagcaacctgatttgcctcaaaggacggatcttcgccttccggaacttctgacacaccctctgtgtaagtggtctcttcgctgagtcttttccgaatctgctccagcacactgtagataccgttacagttcctcctcattattccataaacacaaaatattttattaaattatcgtggcataataccccattttcttcaacaatgtaatgtttatttccatgcaaattcggaaaatttttttgatttttttcaaatcagggattgacaatccagaatatccgtgtatactacaggacataaagcaaaggcgctttgaacttggaaacaggttcaaggcgtctttttttatctttaaacattctgaaaacactatggcaatcagaaaggagaacaaatcatgacacatgaagaaattcctgctttatatggaagccttgtttttaacgataaggtaatgcgtaacaaactgccgaaggatatgtacaaagcacttcgcaaaacaatcgaaaacggaactcatctggagttggacgtagctaattctgtagccgttgccatgaaagaatgggctgtagaaaacggtgccactcactacacccactggttccagccgatgaccggtttcacagctgaaaaacatgacagtttcatcacaccggttggtgacggcgaagttatcatggacttttccggaaaagaactgataaaaggtgaaccggatgcatccagtttcccgtcaggcggacttcgtgctactttcgaggcaagaggttatacagcatgggatcctacatcaccggctttcattaaagatggtactttatatattccgacggctttctgttcttacagcggtgaggcactggataagaaaaccccactgctccgttccatggaaacactgaacacagaagcagtaaagatgctgaaactcctgggaaatgaaaccgttaccagcatatccacaaccatcggaccggaacaggaatacttcctggtagacaaagacctgtataagaagagaaaagacctagtattctgcggacgtactctgtttggtgcacctgctccaaaaggacaggaaatggaagatcattactttggttcactgaaaccaaaggttgctgcttatatgcatgatctggatgtagagttgtggaaacttggtatcccggcaaaaacaaaacataacgaagttgctcctgcacagcatgagctggctccgatctttgataccgcaaacgtagccgttgaccacaaccagctgaccatggaaatcatgaaaaaagtggctgacaaacatggtctggtatgcctgttacatgaaaaaccattcgagggtatcaacggaagcggtaaacataacaactggtctctgataaccaacgatggggtaaacctgttaaatccgggaagcacaccggcacagaatatccagttcctggtatttctgatggctgtcatcaaagccgtagatgaatatgcagatctgatgcgtgtatctgcaaccagcgccggcaacgatcaccgtctgggcggtaacgaagctccgccggctatcgtatccatcttccttggtgatgaactgactgcagttctggaatccatcgaaaatgatactttcttcggaaaacagaaaaaagtacagctggatatcggtgctcatgtacttccacattttgtgaaagataccacggaccgtaaccgtacttcaccattcgccttcacaggtaataaatttgaattccgtatgcttggttctgcagcatctgttgcaaacccgaatgtggtactgaacactgctgttgcagaagctctggctcagttctataccgaactggaaggaaccaaaccggaagatatggaacaggccgtacatgaactgatcaaacgtgccatccgcaaacataaaaaagttatcttcaacggcaacggttataccgatgagtgggttgctgaagcaaaaaaacgcggattatataatctgccgtctactccggactgcctgccacagctgttagcagataaaaacgtggaactgttcaccaaacatcatgtatttacaaaagaagaacttgcttcccgttatgagatcaaactggaaaactatgtaaaaaccatcggtatcgaggctcgtactcttgcagagatgatcaccaaagattttctgccggctgtcagcacctatgccgcagaggtttccaaaaacgcagcagcaaagaaatcctttatggctgccgctgatactacttcggaagaagcactggttgaaaaactgtccactgcttacactgctctgactgcagaggtaacagaactgaaaaccctgattgatacttctttcgctctggaagatacccagaaatgtgcagaagcattccatgatcaggtactggcaaaaatggaagacatccgtaccattgccagtgatattgaagctttaattccagattctatcctgagctatcctacttacgatcagcttttgttctccctgtagtgaggtggaatctatgtgtcaggatgaacggattaaagaagcctgcggtgtattcggtatttataatccccacggggaagatgcagcctcttccatctattacgggctctcttccctgcagcaccgtggacaggaatcctgcggaatcgctgtgtttgacaccagcggtcccaagggaaatatgaatgtacaaagagggatgggacttgtcagtgaagtttttaaagaagatgttctttcaaatatgaaaggaaatctcggtatcgggcatgtccgttattccacaacaggggcggctacattgagtaacgctcagcccctggttctgaattatattaagggaactctggctctcgctcataacggcaatctggtaaataccgaagagcttcgcaatgaacttgcgcaaaacggagccattttccatacaacaactgattcagaggttattgcttattatattgccagagaaagagtccgtaccaaatcggtcgaagaagcgatcatgaagaccgccgaaaagatcaaaggtgcttacggtctggtcatcgcaagcccccgcaagctgatcggtgtccgtgatccccttggactgaaacctctttgtcttggtaagagagatgattcttatatcatcgcctctgaaagttgtgcactgactgcaatcggtgcacagttcctccgtgatatcaaacctggtgagatcgtaacgatcacccgggaaggtatcacctctaaccttaccttatgtcagtcccggcaggctcattgcatttttgaatacatttactttgcccgtctggacagcaaactggacggcatctccgtatatgagtcccgacttcgtgccggtgcagcacttgccaaagcctatcccgcagatgctgacctggtcgtcggtgtccctgactcaggaattactgccgcacagggattcgcggctgaatccggaattccttttggactggcattctataaaaacagctatgtaggccgtacctttatcaagcctactcagaaggaacgggaatccagtgtacgtctgaaattaagcgttctggaatccgctgtcaaaggaaaaaatattgtgctggtcgatgactctatcgtgcgtggaaccacgattgccaatctgatccaccttctgaaacatgccggtgcaaaagaagtgcatgtgcgcgtcagctcaccgcctttcctgtacccatgttatttcggtaccgatgtaccgtccaatcagctgttgatcgcctcttcccattcaacggaagagatccgacagttaatcggagctgattccttaggatacatgaagatcgaagatctccagtcgatggtcggtgatctgccactgtgcagggcctgctttgacaatcactatccgatggatattccaaatcagtaatcgcggaagaagtatcacttctccgattacatacatcacatttttcttacgcaaggcgcatacctctctccaaaggtatgcgccttttcccgttggattgtattgaaaaaggggacgtccccggcggaagcgttctccttgcagcaacgtgggcagggtaactttaagctagccaccaacttcgactaagactctcgcgagagcgctcgagcctaagtctacgtaggtgtcggatcttaaagcttaccctaagcgcccacaaagtgttgctgcaaggagaacgcttccgccggggactggtttttcaatgctgcagaccaattcatgatatgtgatacgtctaaaaaagacgtaagtcttatttctatgactcacgcctttcgtttttcagatacacttttctgactggatatccgcttacttttctggctatcccaatcactttactatatctgtatttttattttctatttctttttactgatttttccccagatcagacacagtaccaccgtgatcgcaatatccggcagtgtattgcctaccgggatgtctattctcatcaggatccggtacaggatgaagccgattatccacagtaccatattggagatctgaatttctttttcgctgtaatcttcctttaataagaagaaatccgcgatctggatcgcgatcatcggggcgaatacggaaccgatcagatataagaagtttgtaatattatccatcggatatacgatagctgccagggcacctacgacagtaaccgcaatggcgatatattttccgttcagcttatggctgagggtctcactggagattcctgcggaatacgcgtccaggaaggtcgtagtaacggtggagaagatgatgatcagcagtcccacgataccaagacctgcttttaccatgatctgggcgatatcgctctcgccggtatagatggctgctcccataccgatcagatacatccagcagctgatcacaccgtagacgatagcgctgactgcggttgcctttaccggctgttttgcttctctcgtataatcactgatcagcggaagccaggataacggcatcgccactgccagttccacagcagcgccaaaggtcagtccatcagctgccacggtctctgctgtataatctccgaagaaaataactttacagagaatcagggtaaggataaataatgctgccatggcaaccgtattcagctttccaaggttggtgataccgatcacgatccataaaacgatcagcgcaccgatcaccagacaccagacccagttgcccacaccggcggcctgattggcggccagcgcaccgtcatagatcatgatcgcggtccagcccaccagctggatcacattcagaagggcaaaaaacaggctgcctttttgtccaaaactgatctttacggtttccatggcactttttcttactttaccaccgatcacacctgcaaggaacaacaggatgcatccgatcagatgtcccacaagaatcgctgccaatccctttttcatgcccagcgaagccagatacgttccggtcaggatctctgcgatagatactcccgcaccgaaccatatcagtccgttttcaaacaaagaagtccgtttttcactcatgatcatgtacctcctttgcatattctccggtaatgtcgaacccgtggttcatcggaccgctgcccttgccgagatccagcatagctgccagagcaccggaaatataggcctttgcgcgctctacagacacatccataggaaatccctttgccaggttggaagcgatcgcgctggaaagcgtacagccggttccatgagtattcgggttatcgatccgttttccgtaaaaccattggcaggttccttcatgataaagcaggtcattggcatcattcaccttatgaccgccttttaacagaaccgcacatccgtactgatcaccgatcactttagctgcctccatcatctccgcttcagaagtgatagtcataccggaaagtacttctgcctccgggatattcggtgtcaggatctgtgccagcggaaacagatattcttttaaggtgcttaccgcgtcttcactgatcagtctggctccgctggtagccaccataaccggatcaactacgatattttttgcatcatactctttcagtttttctgcaatctttatgatcagaccggaggacgaaaccattccgatcttcactgcatccggaaagatatctgtgaaaatattgtccagttcctctcctaaaaattcctcagttgcctccataattgctgttacaccggttgtattctgggctgtcagagccgtgatggcactcatggcatatacgccattggccatcatcgtcttgatatctgcctggatgccggcgcctccgctggaatcactgccagcgattgttaatgctgttctcatattttttctcctttgcatatgaattcaccattacttttttatagcgacgaaaggtggtgcccccaatccgccgcgtatcaaaattgatctaccggatcaattattgatatgcaacgcaagctaaaacagacacaccaaaaggatggtgtgcctgtttttctctgtaaatcatccctacgttggcattatccaaatcaggttatgggtcgaaacgctgccagtctcctctcagcctgcttatgcaagctccccgttttctattcgtttttgagaattgcaaaattgcaaagcaataaagcaatcccggtatagcatttcttatctgtagatgatatcatctcttcccgggccattggaaatcatggtgatcgggaaaccaatcttctcttctacgaattcgatgtattttctgcagttttccggcagatcttcgtatttcttgataccgcggatatcgcatttccatcccggcagagtttcatacaccggctttgccttttccagcagtgtggtggtcgggaagtctgtagttacttcgccgtcgatgtcgtatcctacacataccggaatctcatccagatatcccagaacatccagtacggtgaacgctacatcggtagttccctgcatacggcatccgtatttggaagccactgcatcgaaccatcccatacgtctcggtcttccggttgttgcaccgaactcgccgccgtctccgcctctgcgtctcagctcatctgcctcgtctccgaagatctcggatacgaatgctcctgctcctactgcgctggagtatgctttacatacggtgatgattttcttgatctcatatggcggtacacctgctcctactgcaccgtatcctgccagtgtggaggaagaagttaccattgggtaaataccgtgatccgggtcttttaaggatcccagctgaccctctaacaggatctcttttccttctttcagtgcgttccacaggaacaaagatacgtcgcatacatatggctccagcatcttcttgtagctcatcagctcttcaaaaatctcttccggtttcagaagcggtttgtgatacagatgctccagcataacattctttttctcgcagatgcctgctactttttctttcagcgcttcctcgtcaaacaactcgctgacctgaaaaccgatctttgcaaatttatcagaataaaaaggagcgatacctgattttgtggatccgaaggatttgccacccagacgttcttcttcgtactgatcaaacagaatgtgataagacattaccatctgtgcacggtcggaaatcaggatcttcggtgtcggtacccctttggatacgatatcctggatctctttgaaaaccagtggtacattcagtgcaacaccgtttccgatcacgcttgtggtatgattataaaatacacctgacggcagagtatgcagtgcgaacttgccgtaatcatttacgatggtatgtccggcattggctccaccctggaaacgaacgataatgtccgcttctttagccagcatatcggtaatcttaccttttccttcatctccccagtttgctccaacaacagctttaatcatttggttacctcctgacgggttatcatcatttcctttacaaaaatgattatacaacacttttcttattagtaaaacttattattacttataaattaaagtcaattataaatttccttaataagtataccatctttcttattttcccaccagaactttttcatattttccggaaatctttttagattttccgtaaaccacatggctgagcacatactgaccgtcgttgacaaagatttcaatcagatgatcgttcaccagaatatccagctgtgccgcaccctcaatcaccggagtcgcacctacagttctcacttcgtcacatccttcaagaacggctgaccggtcgccaacgacctttccttcgctgcggctgatcacatacccaccaatatttaaggtttctccctcagaaagatccgtccggatccggaaaacttttccactctctgctgcctcttcggctgtagtttccacgctgaggtatgcgtccacctgtggatgcatgtggaaatacagatgtccctctttttcttccaccacgcgggcactactcatcataccgttccatgccgggcgatccgtactgtctgtcactgccatcggcatacgcatccaggagatcatcactcttcttccctccgcatccagtgtcgtctgcggtgcatacagatccagaccgtaatccacataactgtgggtatccggcagcttcagttcacaggtcttcggatcaaattccgccagcgcccacacagcctggtccggatatttcttctcccccggtgtcagacgcatcggacagccgatgaaaatccactgatcattctgagaaaacagatccggacactcgatcgtccatccgtatgattctggccggcactgatttgcgtaagtccagttttctccgtctttactcgtataaaagagaactcttccggcgtcatgatacgagcttcccatcatcatataatagctgtctccgtctttccacaccttcggatctctcatcttcggttctccgacctcttcatcatgaacagtcggcagcaccttctttttatcccagttattaaaatggaacccgtcttccgatacgatcattgcctggctcgtctgaatggcatcgtccagtacccggtgaatatcttccgggtttggtttcagatattttaccgcgctgtaataaatcttcagcttaccatcttcttccagtgcagtaccggaaaacacaccattctgatcatattctttggttggaaacagtgcgattccctgatactcccagtgcaccagatcctcactgaccgtatgtccccagtgcatggttccccattccggcgcatacggaaaatgctgaaaaaacaggtgatatttgcctttgtaatagataaaaccgttcggatcgttgatccagtttcccggagcttttacatgtacaagatctttcattcttatcgtttcctttctttcggtgcttaaagtaaccggttactttttcttttatcatatcattcacctgtattttcgtcaatattttctcagatttttcatttccgttttttttgaatagtgttaccggttactcgctctttccttgtttttttgagatttttttgctatactggattaagaaattgaaacgatttgtaactgttcagtaccttcacagttacaagcaaaaatgcatttgaaatcaccttcggtgatggcatttttgctcgtatgtctcgggattttggcatatccatgccaaaacacctcgcggaatattacctactgaatagttacaacaattcaactacaacgggtctgacgcgcacgatatgcctgagatcttttccggcaatcgtcggatatttgtacggcttcgactcgttgttcctataaaaagaatgcatgaggcaacgattatggcacgaaaacagaatgtaaccttcgcggacattgcaaaatatacgaatttttccaaaacaaccatttcccggtattttaataacccggattcccttaccgagaagaaccagaagatcatcgcagacgcactggaaaagctgaattatcaggaaaataaagtggcgcggatcctggcaagcggacagaccgaattcgtcggtgtgatcatcccgaacctgtttcttcactattattccgagatgcttgaccggattctttccacatatgagacgtttgggtataaattcctggtgtttttaagtaacggagatgctgacaccgagcggcagtatattcaggaacttctcgcctacaagatcgagggactgatcattttaagccatgcgatcccttcgatggaacttgccaacctgcatatcccgatcgtagcgatcgagcgggaggatgctcacatcagcagcatcaacaccgataactacatgggtgcgatccaggcgaccagtctgctctatcgtcacaactgtgaagtgcttttccacatcaacaatccgaccgccaaaagtatcccggcatacggtcgaatcgaagggtttgaagatttttgcagggaacagcagattccacaccgcgtctttctccatgagatgaaagatcagacagcttcccaggagcatctgaaagagattctctccgagatcgaggcggactctcccggcaggaaaaagggcattttcgtctccaacgatacccacgccagcatcctggtcaacctgctggtacgaaaatacggtaaactccctgaagactacctgatcgtcggcttcgacgactcccccgcctcccgaaacgccatcttcccgatcagcaccgtggctcagcagatcgatatgctcgctactgaagcggtgaaacttctggtggagcagattgaagaacataaaaacagcaaacacacaccggtcagcgaaccggtacacaagatgatcacaccggtgctgatccgcagagagacgacggagagggatctgctggcagaagacaattaaaccacctttttccgctgcccacataactaaaaactcccccgattggaatacacgatatcgtattttccaatcgagggagttttttatactttatattttgttatttccagtcttttatacattgatctcagcagtcatacccagcaggtctttattctcttccagcatcgggttgatgacgtttttcaggaaagcgtctacctgtacggaagcgcgtcctgtgtattttgcaggatccatggttttttccagttcttccagtgtcaggttgaatgccgggtcagcagcgatcagttccagaaggttgttgtcttttccttctactttgacggtctttcctgcttccatggacagttcacggattctctcatgcagttcctgacggtcaccgcctgcttttacagcatccatcatgatgttttccgtagccatgaatggcagttcggaacgcagtctcttctcgataactttcggatataccaccagaccgtctaccacattcaggcacagatccaggataccgtcgattgccaggaatccttccggaacggacagtctcttgttggcagaatcatccagggttctctcaaaccactgggtagcggaagtaattgccgggttcatcgcatctaccatcacgaaacgggacagggaagcgatacgttcacttctcatcggatttctcttataagccatggccgaagatccgatctggctcttctcgaatggttcttctacttctttcagatgctgcagaagacggatatcattggaaaacttatgtgcgctcgctgcgatgcctgccagaatattgaccactctggtatctacttttctggaataggtctggccggataccggatagcactgtttgaatcccatcttttcagcgatcatcggatcgatcttatcgatggtttcctgatctccgtcgaacagttccaggaaacttgcctgtgttccggttgttcccttggaacccagcagtttcatagtgcttaagacataattcagatcttccagatccagcataaactcctgcatccacagggtggcacgtttacctacggttgtcggctgcgccggctggaaatgggtaaatgccagtgtcggcagatctttgtatttttctgcaaattttgccagctctgcgatcacattcaccagttttttctttaccagtttcagagcttcggtcataacaataatatcggtgttgtcacctacataacaggaagttgcacccagatggatgattccctttgccttcgggcactgtacaccatatgcatatacatgagacataacatcatgacgtacctggcgttctctctcttttgccacatcatagttaatatcgtctttgtgcgcttttaattcgtcaatctgttcctgggtgatcggcagacccagttctttctcggtctctgccagtgcgatccaaaggcgtctccaggtacggaacttcatatccggggaaaagatatactgcatttctttgcttgcataacgctcagataacggacttacatatctgtctgtactcatatataatctcctttttcttgtacttgccgcctctttacggacggcttacattttatcggctgtacgcctcacaacagtaaaattatataataccgccccgtgaaacgcaagcttagttctgatgaaattttcctaaaaattccttcattcttgtatggtctgcaccaaatacctcatccggtgttccctccagtgccaccacacctttatccataaagatcacacggtcagagatattttttgcgaattccatctcatgggtcacgatcaccatggtgatatccagatccgccagagatttgatgactttcagtacttcaccggtcagttccggatccagtgcggaagtcggctcatcaaagaacaggatcttcggattcagtgccagggctcttgcgatagccacacgctgacactgtccgccggataactgatatggataggcatctgccttatcttccaatcccatctttttcagcagttccatcgcctctttgtacacctcgcctttgtcccgtttctgtacatggatcggcgcatctgctatattcttcaatactgaataatgtggaaacagattaaagttctggaaaaccagcccgaaacaggaacggatctctttcatctcttttttatccggatgcatcactttgccgttttctacccaggcagcttttttccccatgtacaggatctctccgccgtcaatctcctcaagcatcgtcgcgcagcgaagcatcgtggatttgccggaaccggaaggaccgataatagaaacgatttctccttcttccaccgacagagagatatcttttaagacacctagtccgtcaaattcttttttgatatgattcatttccaacagtttcatgtcgaccctcctagcgataatagttcagtttcttctcaaacagttccatcacccaggctaccacatagttaaatacatagtagaaaatacctgcgataaagaacggtactacagtagtctgtgcagcagcaatctgttttgcaacggcaaacatctcgatataagatacggaatataccagagaggtatctttgaccagtgtgatgacctcgttggtgacagatggcaaaacgatttttaccacctgtggcagaacgatcttgaagaaggtctgtactctggtgtagccgagcagctgtgctgcctcatactgtccggtcgggatcgattcgataccggaacggtagatttccgcaaaatatgcagcatagttcagagaacatcccagaatgatggctgtaaacttataaccgccgatattcatgccccacagataaaacggtccgaaataccagatcagcagctgcagcatcagcggggttccacgcatgatggaaatatagatcttcaccagccagcttagtggcttaaaccggcatacacgtccaaaatatacgatcattcccagtggaagggaaaagatcagggtcagaaaaaagatcagacaggtctgtccaaaacccgccgtcatctgtcgtaccattacctcaatactcattgcttatcctccgtgttataaatactgaaatatagctttgcatttgcccctttacagcaaacatgccccccggaaagcctaacgcctcccgaggggttacattttttcttatccgacgttattttcgtcttcttattcagcttttaaagtcaccatatcggcgatttcatatttttctgccagttctgcaacttttccttcgtttgccagttcctgcagatctttgtttacgatgtcacacagttcctggtttccttttttgaatccgattgcatactgttcggtattcagtgtctcatcgaggatcttgaagccctctcctctcgagttcagctgatatttggcaactccgacatcaatggccagtgcatccagcgcgcctgcctgcaactcggtaaatgcggtgttgtaatctgcaaattcattcagagatccgaaggtatctgccagtgctttctgtccgccttcatcctcactctgtaacagatccagtgctgcggaagctgcctgtacaccaacggtctttcctgccagatcgcccagctgttcgataccggaattctctgcaactacgatcacctggctgttatccacatacggaacagagaaggtataatcatcttctcttccgttcatggtaaatccattccagatacagtcgatggatcctgaattcagttccatatctttggaatcccagttgatcggctttttcaccagttcccagccttctttgtcacataccgtctgtgccagttccaggtcaaatccggtgtattctccatcatcatccatataaccgtatggcggatattctgcatcgaaacctactgtgaacgttgttctgctgctttcatccgttgtttctgcggaagcattctcgatactctcatccgttgtttctgtgctctcggtcttgcttgtatcttcggtcgctgtatctttactggaaccacatcctgcaaacagggacagtgccattgttgctgctaccatgatgcttactgttttctttttcataacaattaccctccggtttttcatatgctaacactctatcatagtaaagtattaatgtcaagacatttttcaaaatttgtctttgtactgtggacacgccggggagttctcatctgcaacatatttttccgaaaatttgtttttatcagaactgatccccggaaccaatgattgatatgcaatgcaaccaaagaaaaagcagtgcgaccgattttattcaccgccttactctgctttttcctgtttaacctgatattcaattatttttattgataatttgtaactattcagtaaccactgtaccgcgaggtgttttggcatgaatatgccaaaatcccgagacatacaagccaaaatgccatcaccgaaggtgattttaaatgcattttggcacgtaactgtgaaggtactgaacagttacgataatttttatcagtatcccgtactcttatggtactccgcagtcagctgttccaacagatgctccatcccctgctgataattctcttctctgccctgctgtttttcttccagtaactttttatattcctggccttccggtgtgtcatagaggtcttccacagcttcttccacttctacatagatttcttcctggcgttcttcatcgacttccagctgtttcgccttttccacaaaagcgtccacaccatgttccatatacacggcatacagaaggctctttaccgctcccatcgtgtgcagtttgccgtaggcgatctcaaagcaacgaatcgcttcttccatctgaaacagccttgcataggcgcagcccatattgtggtagatttctccgataaactgttttccgagaaggatctcctggcggggaagttcctggtctggggtcacttcttcctgtttttcctcccgggaagaagaactatccgtctccgctgcatctgtttccggattctccggtgtactgtcggtctcttcctctactccaccctgtggatcttccatcatatcgatggtgatcgcaaccggagactctgcttctgcgcctgcagggttttctgttgtttcctgcactcctacagtatggtccgctgctgcttcggtcgcttccggttttctgatatccgtcacttcgatgtcatcttccgcttcccggcgaagcgccctttgataaaccttgatggcgttcacatattttccgtgttccatcaaataatcaccttttcgcttctgacgcaacacttccggttcatttgccagctgtcggatctgctgattcaatctgcggaactcttccagagacagataactgatctccttgaacaccggaaggataaaatctcccaccttcatctcatcgtcatccagatgtttatacagattttctgccaatttcttcaatcccagctgatcccggatccagaaacacaattcctcgttcaggatcgtactgtccagcagatatatattatgataaaaataaaagcacagttcttcgatggaatagatattggtactgatgttttcaatataataaggcagttttgcccgttttacctgacacaaaatatatccgctcattcttctgccccccgactcttcatcgtctcatgccatgtaaggttgctcgacggataaagatctccaaatcccatatccgtcacatcaatcctgcactcgtctgccgcagtaaattccagatgtatatgcagtctagtcgcttttgccggacggtccggaagaccgggcaaaggcatactgtagcgcactttaccggtattttccatatcagacacaacaaattccagttccctggtatcatccagaataatttcacagtctcccattgcttcgtaccagttgacaccggatacgatcaggggatgataggccggtgttccgaacacggtcatctccatgcccacattttcccgtaccagatcattgcccacatacagataccccttcagattccgttcctctgtcttttctttcgcagcatagcaggcacccttggaaaacagattatttccgtaaaatacccggcgctggtgtttacaaagctcagccacagatttttctgcccagtctcgctcgaacccttcccccaccaggtaaatacttgaataaacctcacttcccactgattctgtcacaaactggcaaaaatccacatctcgctgcatatattccgtgtgtagtgtgatatgaccaccccgtctgactccgacatgtaccggacgggtactgcggttcatctccagttttgcataagaaacttcatccttgtcaaatacaaacaagcctacacttctgctccagatctccggtttctgatataacgtatgataataaaagctttcttcataatcctgcagaaaacaacggtttctcggaaatcccatctcccggcatgccacccggatgttctccaccatcgggcgtgtcagtaccggcgtagtgatcatcagtccgttgatactcttcaccagatccggcacaccaaggatacgaagtgcattaccgataaattttccgagaagttctccaaccttccatgtagccccgtccacttccactgtctcctgtttcagacacagtgtatacaggttttccaccggaatctcatcctgctgttccacaaagtactctacttccaggccgaagtgccattcctcttctcccggtttcttgctgagcacattggggaaggtatactgaccggttcccaccttcaccggcagagaaacgggttctccctcacgccggtcataataacacagctgcgagaccttctccccaaaatcaaatcctaccaatatatttctgacttcgttcatttttctgcctccatctgtgtattacgcatggagtaccggaaacatttttcttgcaaaatgttctctctgtaggtactgttccatggctttttctgtctgctctctccgtcccagtttccggcctgccagcatctgattgatcagctgatattttgtgtttccttcctgtaaagactcttccatcgtcagaagtttcttttccgtctgtcgggtatcatccggcagttccactgtcaggtaatactccagtatctcatcataaaacagcaggaattcctttacaaaaatgccctggtacatatttttcatcggttcacttttaaagttttcaccggtatctttgtcacggatcagtcgataatgaattgtcacccgcgctccggccgggtactgaacctggataaactgtttgtcatccatctggtatggttttgtgaatcttgccgggaacttccggtaaaatgcaaaccgcaggctgttttccgtacattcttcgagaatctcatcgatcagtttttcctgctcttctgtataagcatccagttctgcataatatttcaggagtgccaggtgacagatccggtctacctcctgctttctcctgcaacattgttccaggcattggaaaatatatggatctgtttcttttttgcccagaaaatatccgtatgcccagaaagaaatgtatgccaggatcacaggttcttttcccttctgtgccacatactgttccagcatcgcagctccctgcctcagatagacacgtccgaacatggagagtagaagaatctcttcctccagcgcatacgtatccagctggaatccgcgcatccgttcccataaaagtgccatctgttccacagatccaagcagattatcgctcaggtaaatcagaatcacttcattgtagagtccctgttcaaatacatactgcgccagatacaccagttcttcctgttccacaaaatcataatccagaatcagatagctggtcagtttcatcagactttccgtttttatgccttcatagccataacggctgatcatgtccaatgccgtggcatacatccctttttcaatcaggatctcgcagagtaataccttatctacttttgcaaatgtcaccagatccatttttttcagataactatccagcgtatcatcgcctgcgtgttctgcataatattccagaatttttctgcataccatatggcggtatggctcttggaattctgacatttccaccacatgctggtaacagccaagggtggaaagcccgatctgtctgcggctgtcattgccacatacggcaagtaacaatccgggtgttgcgatatccagattcatgcacgactgcagatatggtttttcatccatcagtttctgtatattgtaatctaccgttgtcgcataacgccgccgtttctcatcctcaaaaaggattctcgcatccggtgtatacagctgaatataggcagcaccgtctgtgcacggatagctttgttcttctttcagttctccatgacacacgatgacgctgcgaatcttcggatcatcacagtacacccgataagaaaacataactttcgccatcgcttctccaagagccggcgttgcaatgtcttcgatgcattcctgatagatggtagcataatcttcactgattcttccctccatcaatgcttcctgcgcgaatgcttccatcgccttacgataattctgatatgttgtcttatctgcctctttattgcgtattacattggcatacacagatgcccgttttctgctgctcagtgtattgttatatacaaaatacatacggatcacctgcggcagtacactctggaagccctgaggcatagtttcaatataatattcatataagcgagtgatccggatatctgcctccactgccagctgataccagcggaaatactcgctcttcgccggctgtcccttcataatgtatttgcagatatgatccaccagatcattgccaggataagcctcgtaacattttaccagcagacggtagatcaccggctggaaattcttcacatattctgagagatgcccgatccgcatggtcagttcttcattcagttttccataacgtgctgcatagtgaagaacctgtaccataaacggtgacagttttttcagatagcctgcttctgtttccattttctcataggctgccagatacagaaacgggcttctgcatcccagatcaaacaattcttccaacatatacatctgtctgcccggtgcctgcttatattcttccgaagtttccatcagcactttcaggattggataactgcccggattcatacgatagagattttcgatcctggcctgtgctgtcatcttctgttcttcagtagccacagaggtcttcactgccagcgccagataccaggcttcttcctccatctgttccctggtaaatttcagttccctgagaggccacagcacagacatggcatttgccacatctccggtctgttcatagatgtatgcctctgtcagctgttgtttcggataataacatccgagattccggagattttccaattctttcaaggatgcttctttccattcctgctgttttatctcgcccagcagatatttttcatacagtgttgccagtgccgcctgcccttttttctcataagttcttgtgctcagttcataggaagcattgcccgaagccttcacctcatagatatacgttccatatacggttttgatccggatctgtccgtattttcttccgcttcccagtttttctttacggatcagatattccagcccataaacacttccgatgaaatcctcactggtgatcactttcttttccacttccaggaaatctccggtaacctccacttccatccgggtatacccccaggtgctcttatacagattcagacaatctttgactgtagtatccagatgatcccaggtctgttctgtcttttccagacgcagagtcaccggctctttttttccggttccgatcagaaactcttccatatgctgataggtcaccgggtttctggacatcccccggtacaggctttcgtatcccggatcttctccctgcagcactttcagaaagctctcgcttgtataaagacgaaatgcctcccgataatcactctccgccagtttgataaatgcttccagattatccactgctccgcgggatgtctgaatcccgtcgtctgtgatctctgcgtgtaccggcacctggtattctcccaggttactgttgatcgtaatcactgcatccaccgtctcacctgcggacagtcccttcacatccagcccgtaaggaatacatacggttgttcccgaaaatttttcctttgccagcagtacccggcgattggatgacatggtcattcccttgatcctgcggttatcttctgccgccacatataattctccccgaacattctccccttcattggtcgtaaggttaatctgtgtatcggaaagagtcagctttggtacttcatattcaaatcttccgtttagtaactgttccattcttcttttcaaagtatccacctgcgcttcttcttttatcgaccttgactatttttttcttatcattataatgaaactaacatgattgcttatttcatatggtgttgggacaaaaggcattttgcccactttcttatcattttgcaaagcaatctgcaaaaatactcataattatttttattatacactacgcaaaagtttgttgcaagaaaagaggagacattatgattaaacacaaggatcatttccacggcagtgacctggaagctattgagaaatgttatcatattaagaaggaggatatcatcagtttcagtgcaaatgtcaatccgctgggaatttcttatcagctacgttccacactggccgataatctggatgcaattactacgtatcctgaccgggagtatacagctcttcgcacctgtattgccacgtatgcgggaacgcagccggaaaatgtgattgtcggaaatggttccacagaactgatttctctgtttattcagacgaagcacccgaaaaaagcactggtacttggtcctacgtattcggagtatgaacgggaaatcgcactgggcggcggtacaacactgtattatcctttgaaagaagaacatgggtttcatatggatgtggaagatttctgcagccatctttccgatcagctggagcttctggtactctgtaatccgaataatcctacttctaccgcaatcacctgcagtcagatgcgccgaatcctggatgcctgtctgcagtatggaattttcgtgatggtggatgaaacatatgtggaatttgcaccggaagagaaagatgtgaccagtattcctctgacaaattattatacaaatctgatcattctgcgtggcacttcaaagtttttcgcagctccgggactgcggcttggctatgcggtgacaggaaatcaggatctgatcaaggcaatcaatacaagaaaaaatccctggacgatcaattcgctggcagagattgccggacggctgatgtttccggatgaggaatatattcgtcatacgagagaactgatctgcagggagagagaccgtttgtataacgagttgtcgacctgggacagtgtgacggtgtatgaagcttcggcgaattttatcctgatgaagatccggaaacccggaattacttcccaggatctgttcgatcattgtatccggaagggactgatgatccgggattgttccacgtttccgtttttggatgatcattttgtgagattttgcgtgatgctgccggagcaaaatgatctgcttttggaagcgttcagagaggtgttactgtaaaactttacttttatgcttcctgacagcttacatcatatactgctcaagttctaccggattgttcgtatattctctggcacgttctttcgtgatatagccctgtcgcatcagtcgggacagatccatattcagggtatgcataccggcgtttccacccgcctgcatcattgcagaaatctggtgcgtctttccctcccgaatcaggttcaggatcgcatcggtagccaccagaagttctgttcctgctatccgggctgctcctttcacttctccacaggggatcagacactggctgacaattcctttcagagcagcagccagctggattctgatctgattctgactgccggtcgggcaggcatcaataatacgttccactgtctgtgccgcccctgtggtatgcaaagtggacagcaccagatgaccggtctcagccgcaagaagagcggcagagatggtctcataatcccgcatctctcctaccaggatcacatccggatcttcacgcagagcacttcgcagcgcatccgcaaagcttcccacatcttcacccacttctctctggtgaatcaaagatttcttacattgatatttgtactcgatcggatcttcgatcgtaataatatgccggtcgctgttctgattcacatgttcgatcatcgccgcaagtgtcgtggactttccgcttccggtcggtccggtcacaagaatcagctgttccatctttgcatccattcgctatcctcctgtactttttttatgatttctgtcgatatattcttcctttttcaaactttcctgatacaatcttctttatacacaaatatctgcttttcgcagctatctgggccgttacaatatcggtcaagttctatatactatgttgtccctaaacctcataactgatcttcatcatctcttccggcgtggtcactccctgttccaccagctgaagtgcactctctctcagagtacgcatcttacgcacttcccgcgcgtactttttaatatcttccaccggagcatgctcgatgatcatccggcggacatggttatccaccactagagcgtgtctgaaaaaggcttttcgtgagctgcgagtctcagtttgtgggagattttatccgaatgagagcggcgtagcgagctacggcaaccgaatgagggtaaaatataccgcaaagtggggcttgctgattgcggaaatgatttttcagacacgctctaggatctcatggatagcaattcgtccacgataccctgtattattgcacttctggcatcccataccacgttttaccctgcggatatctgccccgatcaggatacgctcccgctcagtggtctccacttctttttcgccaaaaagtccaagatagtttgccgcatctatctccagtgtatctgcactgttgtcttttacaacagagttctctcccagtgacagattgctgatttttgtatttttcccttttcctgtcagtgtaatctcttttttcgtatcttcctcttcataacggatgttggaccgatgccgaaaatacgccactttgattttattctctgtcgaatcatctccgtacaatgtattggaactattggaagttactttttcactggaacgatactcatttgtggactgacttccccgctgataataagagagtgcctggatgcttgcatagatggtctgctgttctttcagactttctgctacttttgccagacgcagaatacttgtacttgttgttgcatccagcatgcttttgtcataggtatatccgtcgagaagacccagaactgcattatttgacgccgatgccccgtcatgttctttatccagcgtgattccatagatttttcccttccgtttactatctgtaaacggtgcttcttttccttggctcatcacttcttttttgaactcttcccactgtccggaactgcgataataagtcagcttcgactctgcagccagatacaccgtcttcgcattctcctcattttttcggaattctgccattttcatatagtgcaaaaccgatggaattgcgataccaaggatgaccgtcatgctcaccaataccaccacaagttctacaagagtaaatccttttttcttttgtccgctcattttctgtcaccttttactgtttctttgtaactgttcggcacctcgcagtatattatctacggaatatttattacatgcagatttttctcataaaaagatgatactttgcactctgcatatgagataaaagcacttccatacagctatatttctgtgccatataaaagtgcttttctattttatattaatataataataaaatatttttgtaagtcaattgattttattaatatttgtacatatttttccgatttttgctattcttccttttatttctgaaagttatcttcaacctgtacaacattttttattgaaaatcaaacaacgaaatctgattcgattccggtatatccccgaagatatgcagatcatccataaaatcaatcacactcttgctgaccttcgtccgctgtctgaaatcatcttttgacagaaactggccgtctctcgccgcaagcaccaccgcatcagccgctttatctcccagtccttcgatactgtccagcgccggcatcaacttaccgtcgacaacctggaagcggtgcgcctgtgccttataaagatccacctccgtaaacgagaaccctctcgcatacatctcctgtacgattttcatatcttttacggtatcctgctcttttttcgtcagcgtatcacttcgtttcttataatctgccatataatactctagccgttcccgtcccatacacatcagttcataggaaaatgcagaagcacggatactgaagtaagccgcatagtaagccaggggatagaagatcttataatacgcgatccggtacgccatcataacataggctgccgcatgagccttcggaaacatgtacttgatcttcttacatgaccagatgtaccagtccggcacatcgtgggctttcatctcctcttcccactccggtttcagtcccttacctttacgaacgctctccatgatggtaaacgaaagctcactctccagtcccttattgatcaggtagatcatgatatcatcacgggtacagatggccgtggaaatggtcgcttttccttcctctattaatgtctgtgcattacccagccacacatcggtaccatgggacagaccggagatacggatcagatctgaaaaagattccggtttggtatccagaagcatctggataacgaaatccgtaccaaactccggaatcccaagacagcccagtggacagccgccaatatcatccggtgtgattcccagtgcctccgtactcttgaacagggacatgacactctgatcatccaacggcacctgctgagcatcaaaatgggtgatatcttccagcatacggatcatggtcggatcatcgtgtcccagaatatccagcttcagcaggttcgcatcgatagaatggtaatcaaaatgggtggtgataatatcggtattcacatcatttgccggatgctgtaccggagtgaaggagttgatatcttcaccaaaaggaagaacgatgataccgcccggatgctgtccggtggtacgacggatacctgtgcatccctgcacgatccggtcgatctcgcagtttctcttgtgcacaccacgctcttcgtaataatttttcacataaccgaacgctgtcttatccgccagtgtaccgatcgttccggcacggaaagtctgtcctgcaccaaagattacttctgtatatttatgtgccttactctgatactcaccggagaagttcaggtcgatatccggctctttgtttcccttgaatcccaggaaagtctcaaacggaatatcaaaccccattttcttcaatggttttccacaccgcgggcatatcttatccggcatgtcacaaccggcacggccggaatatgttttcacttcgtcggaatcaaaatccacataatagcactctccgcacagatagtgaggacttaacggattgacttccgtgattcccgccatcgtggcaacaaaggatgatcctacggatccacgggaacctaccagatacccgtcctcgttggacttccaaaccagtttctgtgcaatgatgtacattacggcatatccattggagatgatggagttcagttcccgctccagccgtgccgatacgatctccggaagattcggtccatagatcgcatgagcctcattatagcagatatcacgaagcatctgatccgagttttcaataaccggaggaaatttaccgtcacggatcgggcagacccggtcacacatatccgcgattttattcgggtttgtgatgacaacctcttccgctttctccgcacccagatattcaaattccttcaacatctcttctgtggtccgcagatacagcggtgcctgatcatccgcatcgctgaatccctttccggtcatgatgattctccggtagacttcatcctcgggatcaataaaatgtacatcacaggtggcaaccacaggttttttaaactgttctcccagtttcacgatccgtcgattcagatcccgaagatcttcctcggaggttacattatccctgttttcatcccgcaccataaacatgttgttaccgatcggctggatctccagataatcatagaattccaccagacgggcgatctctgattccggttcatcccttaaaatcgcctggaaaagttctcccgcctcacaggcagatccgatcatcagtccttcgttatactgcagatacacactctttgggatcctgggccgccgattgtaaaactccaagtgtgattttgacaccagacggtacagattgacccggccaatctcgctggtggccagaataatcgcatgataggtcggcagttttttgatggtatgctcggagagttttccggcctcatttaatacattcagatcaaagatgtctcgttccttacacattttaatgaattttacaaaaatttccgccgtacaggccgcatcgtccactgcccggtgatgattcaacagggaaatattcagtgctttcgccactgtatccagcttgaaccggttcaggcccggcagaagcatccgggcaagacctaccgtatccacataagtaaaatcctgttcgattccaaggcgtttgcagttttcgatgataaaactcatgtcaaatccggcattgtgcgccaccatgaccgcacccttggaaaattccaggaattttggcagaacttcttctatggtctctgcatccacaaccatgctgtcattgatgccggtcagctgttcgattttaaatggaatcggcacctgcggattgacaaaaacggaaaagcgatccacgatggaaccctctttcactcgaaccgcaccaatctcgatgatccggttagccaccggactgaaaccggtggtttcgatatcaaacaccacatagggatcatccagactctgtcccctgcttccggtaaccatgcctttcacatcatccaccagataggcttccacaccataaattaccttaaacggcggatacacctgtttcatctcatcctttgtcgcttccgggtgatctttctggtactgttttcggtaatcgctgacaatatcgtcataggcatgattggcttccgggaaggactgtaccactccatggtctgtgatcgcgatggccggatgtccccatttgtaggcgcgttttaccagaacgcttgcatccgtaaccccatccatatcactcattttcgtatggcagtgcagctctactcgcttttccggactgttatccatccggctggtggtaaaatcactgattttcctgatacctgcaagggaaccgatggtgatctcatgatcgaacttatcgatggtggtcacaccttttagcttcaggaaagcaccctttttgatagctccactgatttccggcacctgttcgttgtgcagaaacatttttacggtgatcgtatccgtaaagtccgtgatgttgaacatatagatagtcttctcgtttcggatttctctggcttccacggaagttacctgtccgcggatcgtaatctctcccatctctccggcaatagaatcaatggtgatggcatcgtcatcaaaatcccttccatagatcacatccgggttgtcggaccgtttcaaaggacgtggtccatcgccgtaacgacctttctgaaaattcccacggccaccattttttccaccgtttcgatcccggaaaccgcctttgttcccttcttttccttttttctgtgcagctgccggctgttttccaccgtccgtgtcctgattctgtagatttttcccctgtggtctctgttcttttccgtctgccccgatcattcggtcttcatcaaatggtgcttccataccctgaccggacaggtcttcccctgcttcccggccactgtttttattcccgactttagaatgcagcagaatctgtctggcttcctccagaattctcaactcactgttctttcttcctttactttccactggtttccgataagccggatgtacttttaggttgaaaccacaccgctcgcagaagattttttccagcacccgcaccagttcatgttcccggtctctcgcgaccaccgaatcagtcatcaccagctccatcgtctccgaatcactgaacgtaatctctgctgtatagaacatattgtactccagtgcgctgtactgctttaattccagcagaatactctgacgatatacatccagaaaattttccggtgtatactgactggaaagctggaatttttcgatgattttcacccgcagaggtgcattggcaaaaaactgttctttaattgtctcttccagatgataaatatgctttttatgaatccactgtctactcagaacataaacccgcagacagtccttctgcgggtttatggatactttcattacttttacttccccaagaaggctttccagttccggatccaccttcaactggggaaatacatctaaaaaatctttttctgtcatcatgtcttattcaccacttacgcattccagtgaagtaactcatcccgaagtgtctctaagagctgatcctccggtacttttttgataatctctccttttttgatcagcagtcccacacctttacctccggcaattccgatgtctgcttcttttgcttctcccggtccgtttaccacacaacccataacagccactttgatatccagtggaatatcctgtaccatatcttctactttattggcaagacctatcagatctatctgcgttcttccgcaggtcggacaggatacgacttcgatgccgccgtttcgaagtcccaatgttttcaggatccgtttggctgatttgacttcttctgacggatctccggtcagggatacacggatcgtatcgccgatgccctggtagagaatgataccaagtcctactgcagacttgatatttccggaaaacagagttcccgcctcagtgattcccacatggagcggataatccgttttttgagcaattaattcatgggcttttgcacacatcagaacatccgaggatttgatactgatcaccagttgatcatatcccatatcctcgatgatctttactttatccagagcactctccaccagaccttctgccgtcactccgtggtacttttccaccagttctttttccagcgaaccgctgtttacaccgacacggatcggaatctggcgttctttcgccacatcaaccacagcctggatgcgttcccggcttccgatatttcccggattgatacgtatcttgtccgcaccgttttccatcgctgcgattgccagtttataatcaaaatgaatgtctgctaccagaggaatatgaatttgctttttgatctctcccagtgctcttgcagcctccatcgtcggcacagcacagcggatgatctgacatcctgctttttccagtgtcagaatctgcgcaaccgtcgccgctacatcttctgttttggtattcgtcatcgactgaatcagcaccggatgtccgccaccgatcacctgatttccgattttaattgtttttgtatgttcccgatacatcactgcaccttcctttttcttttctcttctgcataaaccatcctttttatgcatctgatatgattccgtctttgtcactgtttactttcttctgatttcccttattttacaactatcgaatctccagcagcttattcttcagttcatcttccatcttccgaagttccacttctgctgcctgtcgtttcattctgccgtctgcctggatctgcatcacttcgtccagggtagagatcagagatgcattggtattctgcagggtttccagatctacgataccacgctcagactctttcgctgcttccacagatgccactttcagcacttccgcattctttctgagcaaatcgttggtcatatccgtaacctgacgctgcgcctgtgctgcctgagaggcatgttccacgccaagagccagtaccatctgactcttccacagcggaatcgtattcactaccgtagtctggatcttttccaccatcatggtatcactgttctgtaccagacggatctggggtgctgtctgaatcgagatcatacgtgtcagctccagatcatggatcttcttttcaaaccggtcacacagccctgtcagatctttgactgcctgtgcatcttccggttgtccgcttgcctgtgcttttgccatcagctgtgtcagttcggtcgtttttacttcttccagtttcttctttcctgccagaatatacatggaaagttctttaaaatacagcagattctgctcatacatccgatccagcatcgcaacatctttcatcagctgtgtctgatgatcttccagggctgtacagattttttccacatttgtctctactttgtcatactttgtcttcatactggtgattttgtccaccggcttcttcagaaaagagaaaaatcctttttcttcttcctgcgcatcaaagctcttcagttcagtcaccacattcgtcaacatatctcccaccgatccaagatctttggtttttacattttccagtgctttctcagaaaaatcggccatttttttctgggttcccgcaccgtactgcagaatgccgttggtgttatgaaggtcgatctgttttgcgaaactctccaccatctgacgttctttatcatttaacatgctgtcatccagttttgctttttcttcctgtaccggaactacctgtgccttttcttccggttccggagtcggatcaaaggtcagcgttggcatctccatctcatccagtgtactcatatcgttctcctcctcatgtttggtctttatatcccgttttctgctcaaatgccccctgcgtcagtccctcctgcgcaagcatggaatgcagcacggaaatatccgaagaaatatccatggcacgttcctcaaagaaactgtttaacagtttttcgaatgcctgattgatcgtatccagggtatcttcaatctcttttttcgtcttttcattttgttctgtcctgaagctgtccagttcaatctcgcgataagcatccaccagttttcttgtggttggcagataataattcataaatctgcgcagatctgaagccagttccggctgtttttccacttcctgaaagatacgggtgatgatagtttcaagacggctcagttttctgctaatttcttctcccggaagatcgtcattacacttatgaatataagtaatgtattcctgtccttcttccaggatctttctgcactcttccggcatccgggagcgttgttctttctgttgctgttgttgcatctgtacggttttcgcctgtttttccgtctccagatactgctgatacatcgcgtccgtaacgatcagacaggtttctttctgatccagatgcccctgcagaaacattcttttctcaatcatcagtttcagatccttacgaaccttagtttctgtctttccggtcttatcggccagttctttgatattgcagtatgcccggtctccgatctgctgtacgtactggcggaatctcttcactctgccacggatcacagttccggtgattcccattccgagacttgccgctgtaatgcctcccacggtggcggttgcaatgattgacggtacaccgggataaatggctgtcacgattcctgtcacaatagtactgagtgcaaatacaccggtcagagagtatcctgtgatggcaagaatcgttcctgtgatttttcccggcggattcggtgcatagatggccggcagctgtttcccctgctgtgtccgcttccaggcacccgcctgatatgccggtgtatgatctttgccgtaattcgtacggtatgtcacttctgtttttttccagcctgtatttgctgactctctccactcccgctgtgcactgttcatgccctctttcagaccttcctgcagtccgtttcctgcctgtcgcatcccctccataataccattttgcagttttccacccatattgtacacttcctgtacggaagcactgactgtctttcgcacctgctcgtttaattgctgatagtccccgctgttgatggcatcctggacaactttcataaaatcgcttccattattatttttctgatcctgccaatcgtttttttccatgttgacccaatgtcctcccggtctttcctgttgctttctttttttgcaacttttcagtaccctcacagttaccttttttcttattactttctctcgtattttacaaatgtatattccagatcaaaatacgtctgttcatcgctggctgcagtgatttcccactccgtatcttcgtccagattcggaaaatgagtatccgcctcaaaagcgaaatcaatcttggtcacatgcgccacatcacagtatggaagcagttcttcataaacttttcctccaccaatgacgtagatctcatcatcatcatatttcttcagttcttctagaacttcatcgatgctgtgtacgatcactgcatctttcacctgataatttttatcgctggtcagtaccacgttggttctgttttttaacggcagaccgttaggaaagctttcaagagtctttcttcccataactactacttttcccatggtttcctgacggaaaaatttcatatcggaagggatgctcaccagaagtttgttgtcttttccgatgccccagtttttatctgctgctacaataagattcattattattctcctgtctgatacgtttttatttttctgttttcccgactcattgtctgcttgtaactgctcactaccttcaccgttgcgagccaaaatgcatttaaaatcatcttcttacacagcaatcggaatatttttaatctgtggccctgttacataatcttccacatgaagatcatccactgtaaatgcatagaaatccttgacttccggattcagccatacctttggtgccggatgagtttctctgctgatcagctcttttaccagtgggatatggcggtcgtatatatgagcatccgcaatcacatggagtagttcgcccgctttcatatcgcatacctgtgcgatcatcatcagaagcagcgcatactggcagacattccagttattcgctgctagcacatcattagaacgctggttcaacacaccgttcagtgtcagtctgtcactgtctttttctcttgtcacgttaaatgtcatcgaatacgcacagggatacagattcatctcgtgcagatcctgatgcacgtagatgttcgtcatgattcttctgctgtatggattgtttttcagatcatacagtacacggtcgacctgatccatcatgccctctttatactggtgctttactcccagctgatacccgtaggcctttcctatggatccgtcttcatctgcccagctatcccagatatggctgttcagatcgtgaatattattcgattttttctgccagatccacaggatctcatcaaaagcacttttcagtgctgttctccgaagtgtcagtgccggaaattcttttgaaagatcatagcggttgaccacaccgaacctcttgatcgtgtaagcgctctccccggtatcttcccacaccggacgcactttttctccctccgtacttaatccgttatctataatatcctgacacatgcggataaataaatcatctgcgtaacccattgctttcctcctttttcgaaccggctcttcgccagatcaaaatcactgatttaatgtaactattcagtagccattatcccgcgaggtgttttggcataaatatgccaaaatcccgagacatacaagcaaaaatgccatcaccgaaggtgattttaaatgcatttttgctcgtaactgtgaaggtactgaacagttacgatttaattataatatagcgatacacctaattcaatcttattctgacacttccgcccatctgttttactgttcactccgttcccagtaacacggttcttcttttccgatcagcgtttctgccttcttcttttctgctttcttttgcgtttccgctctctttccagttctttcgtgctctttacggctgcccagccgacaatctgtgttcctgtgatgccgatcatggctccaaacgtatcgatgcagacatcccgcaccgacggcccacgtccggccacaaacgactgatggtattcatccgttgccgcaaatccggcacagatcaatcccgccagcagatacagccagatgccccgcacaccgtacgcatacaacggcacacaaagcgtgatcgccaatacacagtattcggtcatatggccgagttttcttacataatgatggtatttgttcgcatacatctgaatctcgctgtccgtcagtttcatatccagcacttctgatccgacttccaccagttttacactcactttgaaactcagatcacccgactccgtaccgttctgcgccgaaaaagaaaatatcatatacataaccagaagagccgggaggaaggataagggtttcagaaaggtgatgatgactttatgaaacatgggtttgccccctttttgatttttggattcgttggttttgggtgaaatagatttggtctatactatagcatttttaggcggttatgtcaaagtttgttaggggagtgtattcaggagggacgcagagggagagtagcacaggggcggggacgtgggcagggcaactttaagctagccgctaacttcggctatggttcacgagggtcagctgaccctcgcgaaagcctgcgtaagcgtcggatctcaaagcttcccctaaccgcccacaaagtgtccccgcccctatgctactctccctctgctgacttttcctgtaactaatctggcttatattatatactttaatctctagagcgtgtctgaaaaaggcttttcgtgagctgcgagttccagtttgtgggagagtttatccgaatgagggcggcgtagcgggctacggcaaccgaatgagggtaaaatataccgcaaagtggggcttgcagattgcggaaatgatttttcagacacgctctagactacacacacaattttatcgacctaaacaccctattttcccatctactaataattttctgatagatagataaccaattcacttgttcgtattttgggctatcagccacaacctcccgcctgcgaccttcacaccctcccctttgcatacaaacagcgccagatcccggatggaacgttcaggcaacactttatgggcggttaggggaagctttgaaatccgacgcttacgtagactttcgcgcgggtcagctgacccgcgtgaatttagtcgaagttagcggctagttcaaagttcccctgtccatgttgcctgaatgttccatccgggatctggcgcgtccttttttgcaatctcacttacacattacaaaactggctctgatacagctgtgcatagaaccctttcttctccagcagttcctcatgcttgccggtctccagaatatgtccgtccttcataaccagaatcacatccgattccttaatggtagacagccggtgtgccaccacaaaactcgtccgtccctccatcagtttctggaatgctttctggatacggatctctgtcatcgtatcgatggaagatgtcgcctcgtccagaatcagtaccggcggttttagtaacatcagtctggcgatacaaagcagctgtttctgtccctgggacaggcttccgccgtcctcacccatcaccgtgtcatatcctttcggaagacgtttgataaaactgtgggcatgagcctgttttgctgcttcgatcacttcctcccttgtggcatccggttttccgtaagagatattatcccggatcgtacccgttttcagccaggtttcctgaagcaccattccgtaactggaacggagactttcccaggtcagatcctgaatcggtactccatccagtgtgatctttcctttatttacatcataaaaacgcatcagcagattgattactgtcgtcttaccacatccggtcggacctacaattgccacccgctgtcccggttttacttccagattcatatgttcgatcagtggcacctcactggtgtacgaaaagcttacatcctcaaatctcacgcggccctccacctgattcagcgtcttagcatctgccgcattctccggtaccggttcttcgtccagaaaatgaaagattcttcccgcacatgccagcgcgttctgaagttctgtcaccacgccggagatctcgttaaacggcttggtatactgattggcataattcagaaaactactcagctgaccaacggtaattcttccctggatcgcggaaaatgcaccgaaaataccaacgcccgtatacaccagtccgttgacaaagcgggtggaaggattagtaatggaagagaagaaggtcgctttcaggctgcaggactgcagtctctggttaatatcatcaaactgttcctccgcctctttttcataggcaaatgctttaaccactttctggtttcccaccatttcttctaccagagaagtcatctctgctctcgtctcagactgcagacggaacatggtaaatgtacgttttgcgataaaatttgccacgaaaaaagataacggcgtgatcaataccacgatcagcgtgattcttccatcgatggatatcataaatcccagtgttccgagaatcgtcatcacaccggaaaacagctgggtaaatcccattaaaagaccgtcggaaaactgatccacatctgtggaaattctgctgatcgcatcacccggctggtgcgcgtccatataacggagcggaagaatttccatatgggcaaatacccgtctgcggacatcatctacgatcttgtatgtcattttattggtcagaagactcatcacccactgagatatcgcagagattgcagtcaccactgccagctggagcagcaccagtttcagatccgggaagcttaccagccccttctctatcatacagtccacacctttaccaatcaggatgggcgaatacagggtagctgctactgtgactgccgccagcaccagaatactgaccaccagatacgtgtacgggcgaatcagtttcaggacacggtttatggtctttttgtttttcataactgtgctacctcctgactggaaaactgtgacatacagatctccttatatacgttacaattcttcaataattcctcatgagttcctttccccacaagttttccgtcatccagcaccagaatctgatctgcatttttgacggttgccgcacgctgggataccaggaataccgttgcatttccggtactttctttaatggatcttcgcagagccgcatccgttgcaaagtccagtgcggaagcactgtcatcaagaatcagaatctccggttccccgaccagtgcccgtgcaatggtcagccgctgtctttgtcctccggaaaagtttcttccaccggtctctactttttcatccagccctttctgtttcttcttcaccacttcttccgcctgcgcgatctgcagggctttccacagttctctctctttcgcatcttttttacgccactgaagattacttcggatggttcccaggaacagaactgctttctgtggaaccacaccaatcttctcacgcagatgccggaaagtataagctttcacatcctgaccgtctacaataaccgaaccttttgtagcgtcgtaaaaccgtggaatcagattaaccagtgtggactttccggatccggtaccgccgatgattccaaccgtttctcccggcattgccgaaaaactgatatctgtcagagaagcttcctgcgccccaccataagtaaaagtcacatggtcaaacacgactctcggtttcccgctttcctgcgtatttttttcttcagcgccctctttcatggaactgtttaccctgaaaacttcattaatacgtatcgcacaagccagtgctcttgttacagcaacaatcaggttcgccagtgcaaccagcgccagcagaatctgattcatataattgaccagcgccacaatctgtccctgggatacgctgccgatctgtacctgccagccgccaaaccacaggatacacaggatcgcgatattgaccatcacataggtgatcggattcatcagtgcagaaatcttaccggcatacagctgtgtatttttcaggttgccgctgatttcatcaaactgttccgtctcatctttttccctggaaaatgcacgtaccactctggcacctacataattttctctcgtatgaagcacgatctgatccaaaatactctgtacttttttatagatcggtacagtgatacgcataatcagataaattgccagtccgattaacggtactgcaatcaggaaaatgatcgtcagttttgcgctgatagtaaaagccatcacaactgctccgatgacgatgaacggagaacgcaggaacagacggagcatcatattgacaccggtctgcgcctggttgatatcactggtcatacgggtgatcagtgtcggcgttccgatctgatccagttcgttatagctcaggctgttgatgtgtccaaacagtgcctttctcagcgccattccaaatcccatcgccgcctttgcagcaaaatactgcgccgtcagggaacacaccagtcccagcacgcccagtgcgatcatcagcgcgcacattctccagatatacggcttgtcgccattctggataccgacatcgatgatgtttgccataacgatcggaaccagcaattcaaaactggcttccagcattttaaacagcggtgcaataatcgactcttttttatacgctttcagatactgaagcatctgtttcatcttcgttttcctcctgctcttctccgattttcggaggaacaagcattctctggaaagtatctgtcagccagcgcagtcgtccgatgatatcctcacggaactcgcccggaagcatcctccatttccagttttcccccagtgtggatggatgattcattcttccttcgctgccacagcacaacagatcccacatcggaatcactgccagatcggcaacgctagcttctgccgcccggataaaatcccacgggatatcttcccacgggcggtcataattattcagatatgctttggagtactctctcgcccagtcgttcatgccataataccatgcctttgtcgtatcgttgtcgtgagttcctgtatatacgacacagtttttcttatagcgatgcggcagataaaagtttgtattaccggaatcaaaagcaaattgcaggactttcatccccggatatcctgtctcgtccatcagatcaaaaactttctcatccaaagttccaagatcttccgcgatcacatcgatatctcccagtgctttttccatcgcccggaacagatcgatgccaggaccttccttccattctccttccaatgcattttctgcgtccgccggaatcgcataatactctgcaaatccacgaaaatgatcaatgcgcacggtatcgtataatacaagacttctcttcatacgctgaatccaccatttgtatccggtttttttctgtgttttccagtcatacaacggattgccccacatctggccgtccgctgaaaatgcatccgggggacagcctgcaatagcacttggcacaccattctcgtccatctggaacatcatcggattcgcccatgcatccgcactgtcaatagccacatagattggaagatctccgataatggtgattcccttcttattagcatatgctttcagtttgttccactgacagtcaaactcatattccagaaactggtaatattccatctctttttccagctcttttttcttattctgcacttctttggaatcactttttcgcagttcttccggccaggttgtccacagtgcaccgttctggctgtccttgatagcacggaacagacagtacggttccagccattcctgctcttttttacagaaagcataaaatttatcatctgcatcaaaacgtccgtacgcttttctcaaaatctcattttttgaaaagtagattctttcataatctacaaatctcggatcccctccccactgcagctgttcacattcttctttaaaaaggagaccttcttccaccagcatatccagatcgataaagtacggattacctgcgaatgtggaaaacggctgatacggagaatctccatatccggtaggtcccaatggaaggacctgccattttgactggcctgcacgctccaggcagtccacaaattcatatgcctctttcgaaaagcaaccgatcccatatctggacggcaaagaagaaacaggcatcaacacaccacttgctctcatttgtataccctccctgtgtattctcttactaacattagcacatcacttctttcttttcaagcaatcccataattttgcctgtttttctaacaattaaaaaaatttaatttttttcaaaaaaagtgttgacatttgactaactctcccttataataggctttgttgtgagggacaaccgaacaacacaaacaaaaatgtgcgtttagctcagctggatagagcgtttggctacggaccaaaaggccgggggttcgaatcctctaacgcacgcttaaccgtcagaatttgattctggcggtttttgttttatcatttcaaaaaagcagtttctcggattatttataggatcccatgtcaaaaaatcaataaatcgtttgatttttctacaattctattgatttttttcacccctttctttatactagaatgtgttggagatagggttttctgtatgaaactacgtaactgttcagtaccttcacagttacgagccaaaatgccatcaccttcggtgatggcattttggcttgtatgtctcgggattttgacatattcatgtcaaaacacctcgtgggacagtggctactgaatagttacgaaactactatagaatatgtaattttacggaggatagaaatatgtatggattgacacccagggaagaacagattatgaataccatatggaacatggatcatccttgtctgatttcggaaattttaaaagcatcgcctgctttaaaaagaaatacagtagctcccgcactggttgtccttgaaaataaaggttatctgaaagttgattcgattgggaaatcttatacaagaaccggtaaagcatatgttgctgctatttcaaaagaagcctataaagaacagcaggcattcttaaatgccatttctcaaagccgtgatactgaaacaggagttcttgattttcttaccgcctatgtaaaatcaaaaaatatgagtgctgattttccacagcgaatccgggaattcttgaacattactaataccccgttgttgtttcactgcgtatcagactacatgatctgcttttcaaaaataaaatatgaattttcatgtacaccaggtaatctctcgttacctggtgttttatgttttccgtaaaatcaaaattggtccaccggaccagttattgatatgcaacgtaagaacaaagaatgtgccaaggcacattctcgcgtctgcggcggtcgcttgcagcatctaccttatacaccgaagtgcgcatcctcgcggagcgttttttgctttacaggaacacaatttcctgtaaaacaaaaaactgtccgtaaacatttcggtctacggacagttttctattatataattatacgtttgggtctgttggatcccaatcctgacctgccggaatcttaattgttgccggtttatcaaacagcattgctgctgtatcagaaattgttactgtggttccaagtgcacaattatcatagatccattttgcatctcttacgcagagtcgcacacatccatgagatgccggctgaccaagcatattatagttaccggcactcagattgtgactggtcatgttagaaccagctacagagtggaataatacaccacctacgattcttgtacaatactgaccataagatggtcccatcagggtatgccaacgatattttgcaggtgttgtaaacgtacctgtcggtgttggtgtgcctggcagtccaacagaacatgtaaatgtttttaccggaatatcgtattttcctgtttcactctttgcatataccattacctgacatgctacacggtttacagtgatatagtaggaagactgacgtccgatgacgctgtcaagatcctgtaccattgctccggaagcattgaaataatacttgtaaccattgatacgtttccaaccggttgccattgctccgttcgattcaaaataataccagctgcctttgattctcagccatctgtttgcaactctgtttccattactgtctgcataataccaagtatttcctacctgctgccagccggctccaccagtacctgctgttgtcccagcactgcttccatatccaggaacccattttccatcagcacctacccaataagaaccgatccatgtattggttgccattgctccgcttcctgtcacataatagttgccgatccagcgatttgctgccattgctccgcttccatccatataataccagttgtttcctacttttacccaaccagtctgcattgttccgtcagaattactgtagtaccagtttccaccaactacataccaaccggtcgccattgctccacttcctgtcagataataccaaccactggctgttttaacccaaccggtctgcatcgctccgcttccattcatataataccaggtatttcctacttttgcccagccagttaccataacaccatcagagttactgtaataccaggttcctccaaccatataccagccggttgccatcgctccgcttcctgtcaaataataccaagtgcctccacggtttagccaaccagtctgcatcgctccgcttccattcatataataccaggtatttcctacttttgcccaaccggttgccatagaaccatcggcattcagataataccagccgctcggacgactcagccagccactgtaaatagaaccattggaattcatccagtaccacttaccaccgatcacattccatcccggattgcctaccatagctccgcttccgtcgctgtagtacagaccgccgtttgcatcacggaaaaatccggtcttcataacaccggtactagtttccatatagtaccatttgccattgattactctccagccttttgccggtgcttcgttttcgtaccagtaccaattgccatcaatcttctgccagccattaccaagcacctgtgttgcagttccctttgccgcatcaaacatatactcttttccattgactgcctgctttccggactgtgcaacaccgtctttcaggaaatatactttgtcattgatgttctgcataccgttctttgttttgtcggcagtaccgtcatctttcagataaagccaggttttatctgccacattctgccagccggttttaattgttcccacaccttttgtgctgttgaaccagatatcgccgacatttgcccagccattcacagactcgtctaccgtaccgtctgttttcagagcataccaggttttctggatattctgccagccagctttttcttttgtatccactgcccgaccattttcatccagatatctccacacagtattgtcttttacccagctgctcttctggatatttcccaggcctttttccggtgtatctccatcttttgatgcatagtatgtacctgccgcaacactgtctgcgggtttgccagatgcaagatagacattaacttttcctgttgtttcatccgctgctgcatccacaaatccagtacagatataaccttttgcatctacataatagcaatattcgcccattatataaaaaccattatgtccggtcacgacatttccattctgatcctgcaactgccactgaccatccgctgttttttcagatattttataactactgatttctgttccttcttcattctgctgtgcttcctgcgtctgtggaatactctgtgtgttatccgtagccgcataggttggaacagacatcgataaagaaactaaaactcccagtccaaataaaagacttgctctccttttcattatcattctcctctcaaatgggatctttttccttatacctgtcttattctagtacaattacaggggcttttcaagcctaaaaagcagatattcagcaaatcgtaagaaacagatcacctgctttctttattaagtcacttatacttataaactataagcaacacgctacgcgaatttcacaagttatcgcggcagtcgctaaggactcgtgcaagcacggactttggctcgttgctcgcgtaaatcaaaattgattcactggatcaattattgatatgtaatataacgaaaaacagatcagaagacttcttctgatctgttcgatgtatttatctttttgcatctgcatccgtaggatcccagttctgacttgccggaatcttaatcgtcggtgctttgtcaaacggtgtgtactcggtatccgaaatatcaactcttgtgtacagaccacaattatcatagatccattttgcatctcgtacacaaagacgtacacatccatgggatgccggctgacctaacatattataatttccagctgccagcgcataagttggatccggattactgcaggctaccgaatggaaccagtcaccataattattaatctgtgttccatatttaccccaagacggtcccatcaactctactggattctgtttcttcagggttgcataggttcctgcatgtgttggtgttcctgctttacctaccgagcaggtaaatgtttttaccggaatacaataattaccggtttcatttgccgcatatacagtaacctgacacttaactctgtttacggtaattctgtagctggactgtttcccaatcagcttgtctacatcctgtaccatttttccatctgtgccaaagtagaatttataaccatctacatatttccatccggttgtcatggcaccgtctgcgccaaagtaataccagcttccattaattctcttccatgaatttgtcagtttgcttccatccggtctctgatagtaccaggtatttccggatttcacccagttggcattaacatccgggtcataattaggaatccattttccatctgctccaacccagtaagaaccaacccaggtgttcgtcagcatctcaccgtttccaccgacataatagttgccgatccagcgattgctgtacatagcaccacttccgccaaagtaataccatttgttattgatcagatgccagccggcacccaccatatcaccattgcctgggttcaggtaataccaggttcctcccagattgatccaaccggttgccatcgctccgcttcccgtcagataataccaggttcctccacgattcagccagccggtctgcatcgctccgcttccattggaataataccatgcaccattcacctgataccaaccaattttcatatcaccattgcccgggttcaggtaataccaggttcctcccagattgatccaaccggttgccatcgctccgcttcccgtcagatagtaccaggttcctccacgattcagccagccggtctgcatcgctccgcttccattggaataataccatgcaccattcacctgataccaaccaattttcatatcaccattgcccgggttcaggtaataccaggttcctcccagattgatccaaccggttgccatcgctccgcttcccgtcagataataccaggttcctccacgattcagccagccggtctgcatcgctccgcttccattggaataataccatacacctttcacctgataccagccggttttcatagcaccgttttcacccatgtagtaccaggttccgccaacattgatccagccggttgccagagatccgtttccatttacccagtaccaggttccattcatcagataccagccggtagtacttaacattgcgccgcttccatcactgtagaacaactgtccggttgcatccttatagaatccggtgagcattcttccgtctgccggattcagataataccacttaccattgattactctccagccggttgccacccttccgttttcgatccagtaccaggaaccattcatctgctgccaattatttcccagctgtcttgctgttcctgcctgtacatcaaaataataggcaacgccgtttactgtctggaatccgttctgtggtactccttctgcattcaaaaaataggtttttccatttattcctgtctgcataccggttttcgaagtatctctgcttccgtcagctttcaggaagtaccagtttccgttgatctgctgccagttcactttagaagtgtctctgcttccatcgtttttcagcatataccatctgttttcaatctgataccagcctgctttctgaatagttgccacacctttgccggctttcatccatacattttcaatctgcacccagcctgctttagaagtatcaatggttccatcctctttcagataataccagtctttttcaggctgctgccatcctgctttttctccggtatttaccgcttttccatcggatcccagataatgccatgcaccgttttcatctgcttcctgtgcccaacagtctttcaacatacttccaagagtatctgcggaaggatcgtttccttcttttgaaaaatagtacaatcccggttcgagtttatcagctgacggatctgttgctgaatcatccactttgacgtatccggtcgacatatctctatctttattaatatagtatgtatttccattattggtatagaccgtgtcacgtgcatagccatcattgtccggtggagtactctcacccagttttaaccgccaaacatcgccgttctctgtttcatatttttcccatgtcggtgtgacttctttttctttcccatcagcgtccgcagttttttcttcatcctgtatctgtggaatctgagctgcatctgtctcattttctttcgatgcttcctgcgcttgttcattctcgacagaatcctgtgtaacagtagtacctgttacattttctgctgctaccgccggaacagccaccgataatgacagtacaattcccaaagcgaataatatgcctcttctctttttcatctgttcccctcctgtatttttccgtacatacaaatgtacactttttatttattatattatacttatattaatattctaatcatatttcgttacagttttcttacatttccgtctctttatgtgttttttggttgcagccttttctcccccacaccatttttcttgacattccctgaaaactgcactacaatcgtaacgttattattgtgttttattcacaggaggattctttcgttatggtaaagtctgagttcgatgactgctttcaaaacggaaattatgatgcgctccgtccttatcatgtagacaatgccatcatccttgccgccggtatgtgttcccggttcaaacctctgtctgatacgaagcctaaagcttttctgaaagtcaagggagagattcttattgaaaggatgatccgtcagctgatcgaggctgagattccggaaatctatatcgtggttggtcatcaaaaagaagcattttcttatctggcagaaaaatatggtgtgtatctgattgaaaatacagagtatgcagtccgaaataatctttcatctatttatgccgcacgaaaagtgctgaagaattcatacatctgttgttctgatctgtactgtatggaaaatatttttgattcttatgtatatgaatcttattacgccggtactttttcttcagaaaaaacagacaagttatgtgttactaccggttttaacggaaaaatttcccgtattcgaaaaggtggcagcaattgctggtatatgaccggtcccgcttactgggataaccagttttctgcccgtttctgtgaactgatgcagaaagaatacgatgaccctggctcaaaagacctcagttgggaagctttttacagtaatcatctggacgaactttccctgactcttcgaaaatatccagaaggtattgtccgggagtttaacagtctcgatgaactctgtcttttcgatacttcctatatcccctacagggattcgctgaaagcaacctgatcgttccctgatcatttatcgccttttatacgggcaggaactctctccgtatctgtgtacaccggaacgagtattgtctgattttgtttatcctgcaataccaatctgctgttttgcttcctgaagtcgttgctcaaactgactgtaaaaatcccgttttccatcatagggtttctgataaaacagtgtcagcagatacagatgaagtttctttaccagtgcttcctgtgaaatcccctccaacaccttccgggcatctttctgaaaatagtgccactgtgccacaaagttctcatatcttccgatttcttccacgcccagccagtttttgatctttactttggacttcggctcttttttgcactcatatatctgaagaaaatactgaaatccaccttcaccgtcatagcatcttcccagtggaaataaccgacagatccccgggcggatcgcatggatgttacagcggcctttttcatttaaaaacggacactgttcttcttttccggtcatcttcatattcggctggataaatccgtccaccacctgaagttccacacaggtacttaaaagatcctcaaacgtacattccaatcctgttgtcagccggtaaatatccattggatccagaaaaatcgagttccccatcccccgacagcagtcagaacacccctgacattcaccgcatcctgcctttaccatatctttatttgtatataattttccatcagatattttctttaaatcaatttctctttccataatttcctcatctattctttttcttgcgcctttgttctttccatattataatgagttctgacagctgtaacagctgaaaaatgaaaagaaaaaggagcgtttatcatgtcaaatcctgttattacgatcacaatggaaaacggtgatgtgatgaagggcgaactctatcctgaaatcgcaccaaataccgtcaacaactttatcagcctggcaaacaaacatttctacgatggaaaaatctttcatcgtgttattcccggtttcatgatccagggcggatgcccggagggaaccggtatgggtggtcccggatactccatcaaaggagaatttgcacagaatggttttgccaacgatctgaagcacacccctggtgttctgtccatggcacgtgccatgcatccggattctgcgggaagtcagttcttcatcatgcacgagacctcccctcatctggatggtgcttatgcagctttcggtaagatcacagaaggtcttgatgtcattgacaaaatcgccaaagtgccaactgatttccgtgacagaccactggaagatcaggtgattgcaactattgtaatcgacacactgggcgagacttatccggaaccggtgactgtttaatccggaagtttcaaaacaattgatctttcaaaacgcagggaaaacgtcggtgtcattttcggcaccggcgtttctcatcctctcagttcatcccccatcagtatcttcccgttccataccgcataatagcagctatccacaatctcctgactggcccgtgcatttgttgcctctgtcagcaatttttgaaagtgttctgtctcactcattggaagaagtacctgaaaccgtactttatccgtatactcagactcaagcaccggaatttgattttctccgatcagatactggatctttcccaccccgttgtaatccgttccgatctccaggatatttccatactgtttttcgatcagatcactctgtgccagaccttcctgtaccgccttcgaatacgcacgcacaagtcctccggttcccagaagcgttccaccaaagtatcttgttaccacaaccgctgtgttatacagctcttctccgagcaacacatccagcatgggttttcctgctgttccacttggttctccatcatcactgcatcgcacacattctctccgctctccgatcacataggcaaaacagttatgggtggcattccagtactttttcttcatctcttcaataaatgccagcgcttcttcttctgtctccacaagacgtaccgtagcaataaagcgggatttcttttcaataatttccccttcttttccacgatagactgttttatatcgctccaacatggtaattctccttataagtatcattcattgtttttttattataggggattttcctttctggatgcaaggaaaatgtgaactttttaattcagtcttttattgaattttgaaatttgctataataagcaggataaaggaggtacacaaatgaattttggaaaaaattccacccagaaaaagcgaaaacaactgtcttccgcctcctcgaaaagaggaaaacgggcgggtgtcacttttctgcgcattctgtttctgagttttgctgcagtatgtgtgatcttctgttgcatggggattggcgccttccgtgctattctcgatactgctccggatatctctgatgtaaacatcatgcccagtggaaatgccaccttcgtgtatgatgcagatggtaatcagcttcagaaactgtccgctcccaatgccaaccgtatgtcggtatcgatcagcaagattccgctgaatatgcagcatgcaatcgttgccatcgaggatgaacgtttttacgaacataatggaattgatatccagggaattttacgtgcttttgtaaacggtgtctcccatggatttcattttaatgagggcgccagtactctgacacagcagcttctgaaaaataatgtatttaccaactggaccaacgaaggtaagatcgaacgtttcaagcgaaagatccaggaacagtatctggcacttcagctggaagcttccctgactgccgaaggaatggacaccaaaagtgtaattctggaaaattatctgaataccatcaatctgtctgcgggaacttatggtgttcaggccgcggctcagcgctattttggaaaaaacagtgaagatctgacactttccgaatgtgccgtacttgctgcaatcccccagaatccttatgcatataatccgattcgttttccggaagaaaatgcaaaacgtcgcaaaaaggtactgaccaatatgcggaatcagggatatatttccgaagcagaatatcaggaagcgcttgctgacaacgtctatgaacggatccaggaaacagattcttcccaggaaaccgctaccccgtactcttatttcattgatgaactgacctcacagatcattaccgatctgcaggaacagaaaggctatacaaaagtacaggcacaaaatgcactttacagtggtggtcttcggatctataccacacaggatcctgcaattcagtctatcctggatgaagaatatcaaaatgaagaaaacttcccggctcatatacagctcggtatcgactgggccctgacagtgcagaaagcagacggaaccatccagaactatagtaaagaaatgatgaaactatatttcaaagatcatggagaagataattttgatcttttatttgactccgaagaagaagcacaacactatgtggatgaatataaagcagccgtcgttggtgaaggtgaaactattcttgccgaacgaatcagctttgctcctcagccacaatcttctatggttatcattgaccagcacaccggatatgtcaaagctctggtcggaggacgtggtgaaaagactgccagtcttactctgaaccgggcaaccgatacctaccgccagcctggttctactttcaaaccgctggctgtttacggacctgctatcaatgatctgggacttactctggcagacacttatgtggatcaggccatcacttatgagaatacaaaccgcccggttaaaaatgcctacagcggttatcgcggtaccatgacgatccgtgatgctctcaagtattcctgtaataccattgccgtacagtgcttccgtgatgtgaccccacgacttggatatacgtatctgaaagatctggggttcgaaaaagttaccgatcacgaaataatcaacggtcaggttttcgatgacgccagagaacctactgccctgggtggtatcaccaacggtgtttccacattggaactgactgctgcctacgctgcaatcgctaacggtggtacttacaccaaaccggtattttataccaagattctggatcagaacggggatgtggtactgaaaaacaaaccaaaaacagccgaagtcttccgtgaaagcaccgcttatctgctcacaagtgctctcgaaagtgttgtcaacgatgagggtggtaccggtaacggtctgaaactggataatatgccggtagcaggtaagacaggtacaacttctgcaacccgtgacgtgtggtttgcaggttttacaccatattacacctgtgccgtatgggcaggttatgacaccaacgaatttctggaagatgactgcaaatctttccataaaaacttgtggaaaaaggttatgagccggattcatgcggatcttccttatgtggatttcgagattccttctactgtaaagcaggctacgatctgtacctccagcggactgctggcaggttccggatgcccgacccgtacagaatattttgaaacttctacaattcctactgtgcggtgtacccgccattatgtggctcctgcaccacctccattgccctcaccggaagcaagtccttccgactctgagagcaatacagatggtgataccactaccggagaaaacacagattctgcgaccggagatggcacaacaacggatgccggtgctggcgcaacaccgtcggataccggtggcaccgatgctgcaccaccggatgcttctgctccggctgcaggcggtgatcctgccactccggataccggcggacaggatgcagctccggccgcctgacagatccacataacagatggaatcataattggtccaccggaccggttatcgcgatacaatgcaacaaaaagaacggatgcaataccatgtttttcatggatttgtatccgttctttttgttattcagacgtaactgttcagtaccttcacagtgactaatgaatagttacattcagacaacgatttcatctcattgtttgttcttattttcatctaagcgactaccagttttgcagctccgtagattccggcatcgttgtccagttttgccagaacgatcggagtgtctttacagctgatgaaagcgtgttctttgtagtagcctgccactgcatctatcagaggctgacctgctttggatacaccaccaccaataacgattacttccgggtctactacacaggtgaaaatagccagtgccgttcccagatactcggcaaatttatctacgatctgttttgctacactgtcgccttctttatatgcgtcaaagatggtttttgcactgaaattatccagatgcagttttgtctcagcagtattttctgccatgatttttttaccgattcttacgataccggtagcagaagccagctgttccagacaccctttatttccacagttacagctttcggtttcttccggttccacacaggcatgtccgatttctccacctgccccatgtgctccggtaacaatcttaccgtctacaataataccgccgccgacaccggttcccagtgtagccatgatcaggttctttgtaccttctccaccgcctttccacatctcaccaagagctgcaacgttggcatcatttcctacttttaccggaatctgatccagcagtttttccagatcatctgccagcatggtatatccccagtgcagattaactgccacctgtacttctctttcttttacaaccggtcccggaacacctacacccacaccggtaacttctgttttctcaattcctttttcctccatttttttcaggatcgtttctgctacatccggaaggattgcttttccattttcttctgtacgggttttgatctcccatttttccagaagtacaccttctgttgtaaataatccgcattttacggttgttcctccgatgtcaattccaaaacaataactcatctttttagtcctccttcttttttgccaggttcgcctgtacacggttatacagttcctgtgccgcattatatcccatctttttctgacggtggttgactgccgcagattccacgataacagccagatttcgacccggacggatcggcagagaatggcacaccactttattgccaaggatctctgtatattcttctttcagtcccagacggtcgtattctttatcccggctccattcttccagtttgatgaccagatcgatggactgggtattttttacactttccacaccaaacagcgtcttcacatcaatgataccgataccacgcagttcaataaaatgccgggtaatatccggtgcagttcccaccagttccacatcactgactttgctgatctccaccacatcatcacttaccagacgatgaccgcgtttgatcagctccagagctgcttcactcttaccgataccgctctcacccatgataagaacaccttcgccatatacatccaccagtacaccatgaatggagatacacggtgccagctgtacattcagccagcggataatctctgccatgaaattggatgtggttttttctgttacaagaatcggcacattgtactttcttcccatatccagcatatcttcatccggttccgtcatcgtcgtaaagatcacacagggaatctgtttggatacaaaattctcaaaactgcgttttcgctcttccggattcaggtgcatcaaataagtatactctacataaccgataatctgtacacgttcagaggcaaaatgttcaaaatatcctgtcagctgaagggccggtctgttaatatccggaagagtgatgcgtacatgctccatgtccacttccggcgtaagattcttcagattcatttcttgaaccagtttggtcagttttacagccttcatatctcgctctcctttttcaaaactttataaatatcttatcacatgaaacctcaaactgcaagaaatcaaccatcaagaatgaaaaaattggtacactttttgtgcagactgccgattcatcgacggaacattgccaagttcctcttcacttgccacccggatctcctcgatagatttgaaatatttcatcagtgcctttctccgtgtcggcccgatcccctcaatatcatccagaatcgaatggatctgtcccttgcttcgaagcaggcggtgatattcaatagcgaaccgatgcacttcatcctggattctcgtaatcagcttaaacccctcactggtgtgactgataggaatctcatgctcctgatagtacagcccccttgtccggtgattgtcatctttgaccataccgcataccggaatcgtaagcccgagttccgccagtacctgttctgccacatgcacctgtccttttccaccatccatcaggatcaggtccgggaactgactgaaaccactgaattcctcttcttctttgtctttttgttcctcaattcctctccggaaccgccttgtcagcacttcttccatgctggcgtaatcgtccggtccctgtacagatttgatcttaaacttgcgataatcgtttcttttcggttttcctttttcataaaccaccatggaacctaccgactcaaatccgctgatgttggagatatcataggactctacccgctgcagactgtccagttccagaagatcgcagatttctttcatagctccgattgttcttccctcttcccgtttcagtttctccttatcctgggtcagtaccattcgtgcattccttgctgccagttccaccagtttctctttcgttccctttttcggcaccctgatatgcactttctgtccccgttttttactgagccactcctccagcacttcaatctcatcaatatctctttgcagcatcagctctttcgggataaacggtgtccctgcatagaactgtttcacaaaattcagaaggatctgcgatggtgtggcatctgctgcgatccgcagatagaaatgatctcttccgatcattttaccttcccggataaaaaacacctgtaccactgcatcttcttcatccatcgccatcgcgatcacatccttatcctctccctgacttccggtaatcttctgacgctcaccaatcttctgtacactctgcatcagatcccgatattccccggcctcctcaaaacgcagttcttctgatgccgcaagcatcttctcttcgagttcttttaacagttttttataatccccgttcaagaaatccagcaccccctcaatctgcttctgatactcctctttggaaatatacccctgacacggtgccttacactgtttgatgtgataatacaggcaggggcgctccttgccgatatcccgtggcagattccggttgcaggtacggacatggtagagcttgcggatcagctccatcgaatccttgaccgcattggaactggtgtacggtccgaaatattttgctttgtcctttttcatctgccgcacaaacagtacccgtggatattcctcattaaccgtcactttcagatacggataagttttgtcgtccttgagcatcgtgttgtacttcggccggtgttccttgatcaggttacactccagcaccagagcctccagctcggaatctgtgatgatgtactcaaaccgggcgatctgctgcaccatctgttctttcttgattccaagatttctgctgctttgaaaatactgccggactctgtttttcagactgatggcttttcccacatagatgatcgtatctttcgcatcgtgcataatgtaaactcccggttttcccggcagttttttcagttcttcctgtatatcaaacataacccctgttttcccttctttcctatgtttctcagatctctgtttttgaaaaaaggaaaatggcgcagtctcctgttccattttcctttctctttgcctgccttccggcagatatttcttttattcctgtgagtcttccttcaccggctcctgtactttcttttcttctggtgtatcgctgacaggatccgcagttacttcttcctcctgcaatgcggcttctgtcatcggttccgcatccggtgtttccggtgttgcttccactgctgtttctgcgggttccggttcttttccctctataccttctgcttcatggaaaatctccatgaattcttttccggtgatcgtctcgcgttcgatcaggaatgcggctatcttgtccagtgttttcctgtgttcgcaaagcatctgttttgcctgctcgtaagactctttcagcatcttcatcacttcgtgatcaatctcagttgctgttgcatcgccacagttcagagttgcacggccattcagatactcatgctccacactcgccagtcccatcagtccgaacttttcagacatgccgtactgggtgatcatcgctttcgcaatctgcgtagctttttcaatatcattagatgctccggttgttacattcccgaataccacttcttctgcagcacgaccaccaaggagacctaccagcatcgcttccagctccgctttggtattcagatatttttcttcttccggtacctgcatgacatatccgagtgctcccatggtccgcggtacaatcgtaatcttctgcacaggctccgcatctttctgcagtgcacttaccagtgcatgacccacctcatggtaagaaacgatccgacgttcttcctgactgagaatacgatccttcttttctttaccgaccaggacaacttccactgcttcatagagatctttctgagaaacggcttttcttccgttctttacagcaagaatggctgcctcattgatcatattggcaagatcagatcctactgctccggaagttgccagtgcaatcgcatccagatccacggtttcatccagtgacacatcttttgcatgcactttcaggatattgacacgtcctttcagatccggacgttccacaataacccgacggtcaaaacgacccggacgaagcagtgccgggtccagaatctccggacgattggtcgccgccaggatcagaatacccttggatgaatcaaaaccatccatctccgcaagcagctggttcagtgtctgttcccgttcatcgttaccgccaccataccggctgtcacggcttttaccaattgcatcaatctcatcaataaaaatgatacacggtgcgttcttcttagcttcttcaaacaaatcacggacacgggaagcacccacaccgacaaacatctccacaaaatcagaccctgacaaagaaaagaatggtacatgcgcctctccggcaactgctttggccaacagagtttttcctgttcccggagttcctacaagaagggctccttttggcagttttgcaccgattgtcgtgtattttcccggattatgcaggaaatccaccacttcctgcaaggattctttcgcttcatcctcaccggctacgtctttgaacgtaacaccggtttcttgctgtacataggctttggctttgctttttccaacccccatcattccgccgcctttgttcatctttctcatcaaccagttcatcaggataatcaggaatacaaagggtaccagcagacttaaaatagtatagatgatcgatccggttgggtctggctgaatctcattaaaagtaatcttatttccggttttctgttctgcctccagaagtctcgctgtcaatgttgtgctgtcttccatcgcagtggtagaatattcaaattccacaccctccactttctgttcccttggaacaatagtcagcacaccactttgcagttctactgatttgacttctcctttatccagcatctccagaaatttatcataagtgatttctttcgatgtggaactttgtaaaatattgctgaacactgtccagatcagcagggttgccagtacacagatcagcagcaccagcagagatgatttattctttgggcctccgggtccgccatttccattcggtccctgtccgttcggcccctgatcgttataattattcggtctttggtccataatttcctccttttaatacctacattattataaagatttcttcccgataaatcaactcttttccccctttcgtcatcgaattttcaaattactgtttttttttcatttctgtatagcatttctcgtctcttttgtagtatactagagaatgtattttttaactgtccgataggcggtgtttataaaagacacagaacagttacgttattttattttttatacaggaggacaaggttagatgaaaatcggatttgataatcaaaaatatttatccatgcagtctgaacacatccgggaacgtatcaatcagtttgacaacaaactctacctagagtttggaggaaaactttttgatgattatcacgcatcccgtgtgctgcccggttttgctccggacagcaaactacagatgctgatgcagctttctgaccaggcagaaatcgttgttgttataagtgccggagatatcgaaaaaaacaaagttcgtggagatctcggtatcacctatgatctggatgtactgcgattgatcgaagcatttcgcggaaaaggtctgtatgtgggaagcgttgcgatcacccagtacaccggtcagaaaagcgcagatgccttcaaaaagaaactggagaacttagatatcccggtatacattctttattccattgacggatatccaaataatgtttctcatattgtcagtgacgaaggctatggaaagaatgattacatcaaaaccactcgtcctctggttgttatcacagctccgggtcctggaagcggaaagatggctacctgcctgtctcagctgtaccatgagcagaaacgtggtgttcgtgccggttatgcgaagtttgagacattcccgatctggaatatcccgttgaagcatccggttaatctggcatacgaagctgccactgctgatctgaacgatgtcaatatgatcgaccctttccatctggaagcttacggagaaactacagtcaattacaatcgtgatgtggaaatcttcccggtactggaagccatgtttgaacggattttcggtgaatgcccttacaaatctccgacagacatgggggtcaatatggctggaaattgtatcatcgatgatgaggtatgccaggaggcttcccgtcaggaaatcatccgccggtattatcaggcaaaggccggactggtagatggttccaaaaaagaagacgaagtcttcaagctggaactgctgatgaagcaggcacatatcacaccacaggatcgtaaggttgtcagtgctgccctgaatcgcgcagaacagaccggtgcaccggctgctgccatggaattgcccgacggtaaaatcatcaccggaaagacctctgatctgctgggatcctctgccgctcttcttttgaacgcactgaaagagctggctggcatctcccatgaaacacatattctttcccctgctgccatcgaaccgatccagattttgaaaactgcttatctgggaagtcgcaacccgagactgcacaccgatgagatcctgatcgcgctctccagcagtactgctctgaacccggctgctcagaaagcaatggaacagatcccgaacctgaaaggctgtcaggtacacacaagtgtgatgttgtctcaggttgatatccagaccttcaaacgtctcggtatccagctgacctgcgaaccgatttacgaacacaaatcaattcttcataatgcataattgatttgcaacgcaacgagataaaatacgcttcgcgaatttggctcgttgctcgcgtaaatttaaaaatagccccggatttcacgctgtatgaaatccggggctatatgttttttatttatacttcatttcccgtaactttccagtatcttcccggttacgggatacctgctgatcagctattatttttcggttgcatatccatccgggttctggctctgccatctccaggaatcctgacacatctcttcgatgccgtactgcgcttcccatcccagttcttcttttgctttggtaggatcgcagtagcacatggcgatgtcacctgcacgtctcggtttgatctggtattttacttcatgaccgcatgccttttcaaatgcatgaaccacatccagtacactgtaaccatgtcctgttcccaggttgtatacacgaacttccggtttttcttccagttttttcaatgcttttacatgacctacagccaggtctactacatggatgtaatcacgtacaccggttccgtccggagtatcataatcatcaccgaagactcccagacattccagtttaccgatggcaacctgtgcaacatatggaagcagattgttcgggattcctttcggatcttcaccgatcatgccgctcttatgagcaccgattgggttaaagtaacgaagcaggataacattccattccggatctgaggtatgcaggtcagtgaggatctgttccagcatccattttgtccatccgtaagggttggtacaggttcctttcgggcattcttcagtgatcgggataaatgccggatctccgtatacagttgcagaagaactgaagataatatttttaactccgtgatttctcatggcgtcacacagattcagagttcctgcaatattattttcataatactcgattggttttactacagattctcctaccgctttcagtccggcaaaatgaataactgcgtctaccttctctttgtcgaagatatcgttcatggcttctttatcacgaatatccgcattataaaatactactttttttcctgtgatttcttctactctctccagagctttctcactggcattgtacagattgtccacaacaacaacgtcataacctgcattcagcagttctacgcatgtatggcttccgatataaccagcaccacctgtaactaagattctcatttgcttttccctccttaaggaactcattcgaaactgttcattgtctcaacagttccgttgattcttatgtctttcttagtttagcattatctatttgggaattcaatgtcttttacaaatatttaaagcccaaaagcacatttatatatattgtctattattgttacatatcacattttctttttctatgcatttgcgatacaaatcagtacactcactcccaacataccaacagttcccacagttgcaagaatctgaacgatcagccagcttttttctcccgcaattttacgaaatgccttccacaaaagaacccctataactgctcccagagtattattgattacatcagtaatgtcacttgctcccatagcaagcaaatactgcagtgtttctaaaaacagactgaatcctgccccggcgaggatcactgttccccctgctctttctcgcgccaacatacctccatatattccaaatggtacaaagatcaatatattttccgccagttccctgatgtccagatttccatttaccatcaggcaatctccataaggaatcagattgatatttcgcaaatgaggaagtgcatctggtgatgtgctgaacttcaatagtataacccatatcacaaacgccagataaataaaaaataatccacctgtccagtctttcctcttcataaaaacctcctgtatctttctaaaatattttgtaactgttttacagtttctctgttacaaattttccctggtttacaaggaactatagtaacagccaaatttttagaaagacacaggaggtttcttaattttctcttattccatataattttcgtaactattcattccatttataatagtagctgaatagttacaagatttccagaatagctttttgtagcgttgtcatccttccacgatcaaataggttccgtccggcaaagagaagatttcactggcttccagaagttcttctttactcatgccctcaacatccatgccactttcatccagatattcttttacttctttgatgttttttactacaacagccatacattcttcaagaaattcttctgcttcctcataagtctctgccacaggttcatcaaaaagctgtccctgctgttttaaaaatgtttctacgcactccttgctgtacattttatttttcctcctgaatcttcagtaatttttccggtcgatcgataatttcatccgcatgattctcttccagttcttttcgctcccgaaatccccacagcactccgatggtgtacatccctgccgcttttccggtcttcatgtcagtattcgtgtctcccacatacatgcactccgacggctccacctgtagttttttcgcaattttccatgctccggatgggtccggctttttcttcatccccacttccaacccctggatgacttcaaacgtatcgctgccaaacagtccggtcacagccagatatgtcgcttcatgtggcttgttggacaataccgccagcttcacgcctcttcgcttcagttctttcagagtctccttcatcccatcaaatacggtaactttatataatggatctctggcaaaaatctcacggtatagtctctgaccttcttccaggcggctcatatctgctcccgcagctttcatacaccgttccatcagtacatttccgccatcgcctgcatgatatttatagtcctctaccggctgtgccggcgctccaaaacgctccagaatctgatttgcaacatttgcaatggattctaccgtatctgccagtgttccatccagatcaaaaatacaagctttatacatttctgtcctcttcctttcaacccaatctgtcattgctttgttttatccgtttttttcagacaacattctcagatttcttacattatacttcctgtcaccgcctgatgcaagcggaaacgcattactgttcagttactgttcactccgttctcagtaacacgctgcgcgatgcacagaatttatgctgatcgcataaattcgcgcggtatgtctcgggttttctgtgaccttcgctcacaaaaaacacctcgcgggatattgccagtgaatagtaacactgttcaccttccaccgtctgttctcttaaaaataatccttttcttttaacgcaaaatggattagaatagatattatgatatgagagtacaaaaaaggagactgacgcaaatgaataaaaaacttttaaaaactctgactggactggccatcgttggtactgctttaggtgctgcctttgcctatataaaaaaatgtaaagaagtcaatgacctcggtgaggaggacttcgatgatctgtgggatggtgaagaagaaaacccggaagtcagcagctgcaccccatgccgcagctacaccacgattccttcagattcgcctgttcctgaagacaaaaaacatatagaagaatctgaggaagacgcttctgaagaagaaactccttctgacaattcagaagactgattgttcatgtaagttaaaaagcggaacgactgctcctgtttcacagatctgcagctgttccgcttttcttatctttttatttatttggcagtttgaaagaactcttaagagaaacgatccggttaaataccagcgctccctctttggaatcttttgcatccacacagaaaaatccgtttcttacgaactggaagctgtcatatgctttcgcatctttcaggctcttttccacataacagtttttcagaaccgtcagagagttcgggttcaggttcagggaaccgtcttcgttataaacacccttctcttcatcaatgatattttcatacagacgaacctctgcctgcacattatcctgtgcgcttacccagtgaatggttccttttacttttcttccgtccggcgaattgcctcccttggaagcaggatcgtacgtacagtgaacggctgtcacgttgccatcttcgtcggtatcataacccacacaggttacaaagtaggcattcatcagacgtacttcgttgcccgggtaaagacgtttgtatttttttggaggttctaccatgaaatcttctctctcaatgtacagttctttgccaaacggtacttttctggtccccagagtttcattttccatgttgttcggagcttccagctcttcgatctgaccttccggatagttgtcgatgatcagttttaccggatccaggatcgccattacacgggaacgtttcagtttcagatcttcacggatgcagtactccagcatcgcataatctacggagctgtttgctttggacacaccacacagttccacaaacatcttgatggattccggtgtaaatcctcttcttctcagagcggcgatagataccagacgcggatcatcccatccgtctacgatgccttcttctaccagacgtttgatgtaacgttttccggttaccacattggtcaggtacagttttgcaaattcaatctgctttggcggatactgatattccagttctcttaccacccagtcatataacggacggtgatcttcaaattccagcgtacagatagaatgagtaactccctcaattgcatcctcgatcggatgtgcgaaatcgtacatcgggtagatgcaccatttgtctccggtgttgtggtgtgtcatatgtgccacacggtagataaccggatctctcatattgatgttcggagatgccatatcgatcttggcacgcagaacttttgttccatcctcaaactctccgtttttcattcgttcaaacagatccaggttttcttccacgcttctgtcacggtacgggctgttctttccgggctctgtcagggttccgcgatattcacggatctgctctgctgttagatcacatacaaatgcttttccctttttaatcagtttaatggctgcttcgtacatctggtcaaaatagttggatgcaaagaacagacggtcttcccagtcagctcccagccattttacatctgcctggatggactccacaaattcgatcttttctttggtcgggttggtatcatcaaaccgcaggttgaattttccgttatattcctgagaaagaccatagtttaacagaatggattttgcatgtccgatatgcagatatccgttcggttccggagggaaacgggtgcagattgtctcgtattttccctctgccaggtccttttctataatctgttcaataaagttcttggaaactacttctttttccattacgctcctcctcaattcaaaatggagcgtgcctgaaaccagacacgctctgatataatcttcatattaccacattttttttaagaattaaagggctttttctattgtctttccagaatctgcatgaattcttctccggtgatggtttcgttttcatacaggtattttgccagctcatgcagtttcatgatattgtcctgcagaatctgcagtgctttctcatgctgctgtcttaccagttcgaccacttttttgtcgatcagcgtctgtgtctcgaaggagcaactcagggaggaatcaccgcctaaatactggttgctgacattttccatcgccaccatgtcaaactcatcgctcataccgtaacgggtgatcataccccttgccagtttggttgcctgttctatgtcgttggaagcacctgttgtgacagaatggaagatcagttcctccgcggcgcgtccaccggtgaatgtagcaatcttattctccagttcttccttattcatcagataatgttcgccgtcttccacctgcatcgtgtagccgagggcaccggaagttctgggaatgatggtgatcttgtgtaccggtgcagaattcgtctgttttgccgctaccagcgcatggccaatttcatgataggatacgatcagtttctctttctcagaaagtacacggttcttcttctgataaccggcgataaccacttcgatactctcttccatatctgcctgtgtggcaaatcgtctgccatctctgaccgcacggagtgctgcctcattgacaatattggcaagttcggcaccggaagcacctgctgcagctttcgcaatagcactgaagtctacgttatctgcaatcttgatcttctttgcatgaaccttcaggatttcttcccttccctgcagatccggcagttccaccgggattctccggtcaaaacgtcccggacgaagcagtgcaggatccagggaatccggacggttggttgctgccagaataacaacacctttcgagccgtcaaatccgtccatctcagtcagcagctggttcagggtctgctcccgctcatcgttgccgccgatattgccgtcacgctttttaccgatcgtatcgatctcgtcgataaatacgatacacggtgctttttcgttcgcctgtttgaacaggtcacgcacctttgcagcacccatacctacgaacatctccacaaattctgatcctgagatggaaaaaaacggtacttccgcctcaccggctaccgctttggccagtaatgttttaccggttcccggaggacctacaagcagggctcctttcggcatctgtgcaccgatatcctggtagcgttccggatgatgcagataatctacaatctctgtcagcagttcctttgcctcatcctcacctgccacatcagaaaacttgataccggtagatgactttacataaatctttgcattgctctttccgaacatcatactgcccggaccgccacccatgctcttggccattttcttggaaagccagtttccgatcaacacaaaaatcacaatcgggatcacccagctgaaaatcagggtacccaacatggactgtttctgcggaatcacagaaccaaactttacattcgcccgattcagccgatctaccagctcagggtcattcatagttcctgtcttgcagacctcttccctgccgtttacatttactttatagtaaattacagcattctgttcctgtacctctacttcagttacattaccggcactgacctggcttaagaactcgttatatccggtctcttttacacttcgctcactcatccaaggcaccagcagaaagttcagagccaacagaacgaccagtgcgattgcataatagaaaatcacaggccgtttcggcgaattgtttttgacttcattcatatccttttttctcctttctcatatactttattgtataccctggaaaatgcttcctgcaagaaaactatcagaaaatttttataaatttctcataaaatataactggaaattatcctctttctggcatatactcttttatatattaagatgtcggggtcaaaaggtattctgacctctttgataccgaattgttccgtactctgtacgcttataattctcatatcataccacaacaggaggaatctcatgacaggcagcgaacgccgacaggaactattacaacttttatccgggacacagacaccaatttccggtgcctcactggcaaagcattttaccgtcagccgccaggtgattgttcaggatatggcactgcttcgtgctcagggacatgaagtgctttccaccaatcgcgggtatctgatccaggcacctctccgtgtttcccgtattttcaaagtttttcacaccagtgaacagattgtcgatgagttatgcactattgtggatctcggcggcaccgttgaagatgtctttgttcatcataaaatctacggccagctccaggcacctttgcatatttcatcacgcagagacgtacagctctttctggaagagttaaaaagcggcaaatccacgccactgaaagatgtcacttccggctaccattatcataccgtctccgcggactccggcgaaactctggatctgatcggacaggagttaggaaagaaaggatatctctgccagtaactttctggcggtgatatcctttttgtctgttttctatttcccggtatcttattctctattgtctctgcttttctctgtcacaacctgatacatatacagttcgtgcagtgccctcgttgcacagatatattttgcctgccggatcagatcatcctccggctgtctgccccagacagtaaatacctgatcgaattccaggcccttcgcaagatagaacgttgtcaccgtaataccttttttgaaccgggaactgtccttgttcatataggtaacctgttcatctcccagctcttttttcaagattgctgccatctcccacgcttcctgatcggttatggtaagaactgctgctgtctcataaccgtccggctgtacccgcagttccttcagaatctgtgtgataacttctttctctgtaatttttttctcacacaccggttttccatggcgttcaaaaagtttaagatccgtaattccggcaagttcagctgcataagcagcgatttccaccgtattccgataacttttatccatcacgatttttcgaagttttttcccgagaatccccggtaaaaatgtcagcacatcctgctgtttttcatccatagtctgtgcccggtctccaagaatcgtcatcttacacggaaaaagctgtgacagaatctggtattgcatcggcgtataatcctgcatctcatcgattaccagatgtttgactcctgcgcgttttgcgggctgtaacagacgatatttcagatacagcaccggatagacatcctcataacgcagcaaacgcttctcataccataccgatggaagcggacacatcccgacagactccagaaaacggctgtacagcacatagatatctctcgtctcatacatcgccatgaactgttcgtaaaaatactgctgttcttcctcgttcagatcccgtccggcaagagtttcataatcatcaaccacatattcccgcactgcatccatccgggacagtaacggaatctccagaaaccgggtataaaacaaaagcaggatccgggatgctttgatctcgtaatttcgatacgtaaaatcccggatatccatcagactatcctccagttccatcagataaccttccatctggttcagaaaatccggagactgtttttcccagtatcttccccgctccttcggctgtaccaggttcctttcaatcatatcataccggtcttcacagtccggcaccacatctttgagttcccggtaagcaaagagatcaaaactcatttcctgaatattttcttctcccagttccggtaaaatatgggaaatataatctgaaaatacaccatttggcgataagatcagaatattcgaggatttcaggtttttccggtcatgatataaaagatacgcaatcctgtgaagtgccaccgaagtctttccgcttccagccactccctggatcaccagaatccgatcactggtatttcggataatcgcattttgctctttctggatcgtccgcacaatatttttcagctggacatctccattggctccaagctccgctttcaggatatcatcatcgatcttcacatcactctcaaaggcatagaccattttcccgtttttgatcttatactgccacttggagacaatttctccatccatccgtcctcccggtgcttcataccaggcttctcctttatcgaaatcataaaagagaccgctcaccggggcacgccagtcatataccagaggtgtctgtccggttctttcagcaaaattgccgataccaatataaaaactttccgccgtatcttctccgtcataacagaaatccactctgccaaagaaaggggaatcaagcattttctgaaacctgtgtttcagatgcatctgttgctgatttgtattcagctgattcaacagagcctgctgattatcataatcctcatatccgtactgatccatctccgtatagttttcccagtagtattcatgcatgtcttctacttcttttgcccctttttcaagggacagattcagctttgcgattcgttctttcagtttttctagtaccaggtttaagtaagcagtttggtctgtcatcgtcctcttcctttatacaagaggctgttgtacggtcttaccggcacgtaccacagcccctgttatttacatttcataactgttcagtaccttcacagttacgagccaaaatgcatttaaacgataaaaacacgctttgcgagtttttatcgttatcgcggcactcctcaaggttccgtgcaagcacggactttgactcgttgctcgcgtaaatcaccttcggtgatggcattttggcttgtatgtctcgggattttgacatattcatgtcaaaacacctcgcgggacagtggctactgaatagttactacatttcataaaatgctttgtagcatttggttgtctcgtatacatctgccttggaacttacttcatacggtgcatgcatattcaggatcggtacaccgatatcgatcacatccataccgtaagctgccggaatataagcgatagttccaccgccacctgcatcgattcgtcccagttctgccgtctggtattccacttttgcatcatcaaacgctttacgtaagatacccagatattctgcattggcatcattagaaccgctctttcctcttgctccggtatatttgcttatcgccgctccttttccaacgtacgcggaattattcttttcaaatacttctgcatacagcggatcatatccggcattgacatctgcagacagcatttttgagtttttcagagcgcgacgcagtttcagttcagagtattccccctgactgttgatcacttctgcaacagtattttccagaaaatgagcatgcataccggttgctcccacgcttccgatctcttctttatccacaaacaggcatacttttgtctttgcagacggtttgctgtgtaagaatcccatcagagaagtaaaggcacagattctgtcatcctgtccgtaagccatgatcatgctgctgtcaagaccgaaatcccttgctgctcctgccggcacaacctcaagctcggcagatacaaaatctttttcttcaatgccatactgttcttttaacagctgtaacacataagctttgaccggattttcttccttttcatcttcttttttatccatcggctgactgcccaccagaagatccagtgcttctccttcaacgacaacgcttccttttttctccatctgttttgcggacagatgcaccagaatgtcggtcactcccacaaccggatcttccggtttctcacctatgtttatctgcacggttgttccgtctgtttttacgatcacaccgtggatcgccatcggagaagctacccactggtattttttgattccaccataataatgggtgtccagataagccatacctccgttttcatataacgggttctgtttgatgtccagacgcggagaatcgatgtgggaacctatcagaagcataccgttttcgatatcatctgttccgatttccatcatgattacggattttttcatattttccgcatagattttatctccggctttcaactgctttccttcacggatcacatcctccagattttcaaagccctgttcttttgcgattctgcagatattgctgctgcattcccgctctgtctttcctgcatccagaaattcccggtacatctttgccagtttctggatctcttttttttctgtctcatgatactgtctcatgattcttacccctttctgctttgtaactactttgtaactgttcaacatcttcacagttacactactttttgtctttgcagaccatattaaaaacagtaccacaaattttgcggtctgcataggtctttttcttatttccactcgactttgcttccggattttccttttgtcaccaccagcttctgctcaatctgttctttcagttccgttacatgggaaatgattcccaccagccggctgcctccggagagtccctggaggatacggattgcctgttccctagcattttcatccagtgaaccaaatccttcatcaataaataaggtatcgatatgaactgctcccacagcctgtgtgatcacatccgtcataccaagtgccagtgccagtgctgccatgaaggattctccaccggaaagggtcttgacatcccgcacctttccggtgatcagactgtagacatccagatctagaccggtattcccctgagtggaaaggttttccatacttctgcattttagcaaaaactgtccggcagccatccgttccagatgacgattggcacatcggatcatatgctgaaaatactgacgctgcatatacgattccagatcgatctttgccgtgccggtaaggctcccgttggcagtgcgactcagagtattcagtacctgataccgttttcgcagttcttctctctcctttgtcagctgcagtagcctccggtttgcctgctgattcgtctctcgccggctgtaaagttttcggagttctctctccttcatcctctgctgttctttttgttccttcagctccttttccgtctgttcaagatccggggcttctttttctttcagctggcttctcagccatttcacttcctgacagctccggcgcagctcctcttcgtaggcatctattgctttctgcctctgctccagctccgcaggtttcatgcatgctttcttaaaatcctcttctttttcaaaaagttgttccctccgtacctgttcataagcgttctgtttttcctgttcctgttgttttaaagttttacactgtcgctgtacctcttccagctgaccttttttcctgttttcttcctgcaggaatttttgcagactcccggagacacgatccagctcttttttggatatctgaagcttttcttctccgtctatcaatcgtttccgggctttttcttcccagtcttcccagcggtttttcatcacttccagactttcttcctctgtctgttctctatgtaacagatgcgtttgctgctcccggatgaccgctatttcctgctgatagaggttttctgactgctgatacttctgtcttcggtcttccctggtattttccgcctgatttcggcgttctctctctttttccaccagttcctggctcagattcttggaaaccgactccgccggagccggatgatggagggaaccacataccggacagggataattgtcctgtagcccggaagcaagaatccctgcctgtccggcaagatattcctgatacagagtttcataacgttgggcctgctgccggtaagaaaggtctgctttccggtaactgtctgctgcctgctgccggtgtatttccagacgctgtgcttctttcagatggctctgcagctgtccgtactgttcaagtgcctgtcgcagccgttcaagcaccggcacttctttctcctccagtttctgcacataactgttccaggttttctccttttctttcagtttttctgtttcctctttccgttcctccagccacgctttcagctgtttttcctgcatctgcatccgttctctgctctctgcagtctcccggtagcctacataaaccatttctacttttgccgcccgctttgcggcaccgatccgttccttttcctgttccttttcttctcttttctcttccagcacacgaatctgtttttccagctgcgtaagttttgaaaaactctctgctctctctttttccacactgtaacgctgattcagtttttccagcgtcgcagttgtttttttcatttctttccggctctgttcatactgcaatttatcttcttccagcatgcgctctgcaaaagcaagcaccgcctcaagatccggttctttctgtcctgtccggagcagttcctccttttcctgaaccgtgctttccgaaacttccagctgttctatctcccgcagacaggactttctgttatcctccagctcaccgtaacaccgtttgttcctgtttttcagctcctcctgcacccgtccgaagattcttgtatcaaagatccgggagaaaatttcttttcgctcatcggactttgccagcagcagccgcagaaaatctccctgtgcgatcatcgcgatctgcataaactgcctggcatccacaccgaggatttccaccagtttccggttaacttcctgtctgtttcccggatacagactgccatccggctgatacagctccacgctgccccgttcctttgtcatcgtccttccaccgtctttgttccgtcgtttgctctccctctcatactccggacttcgaagcacccgccagacctgtcccccggtggaaaatgtcagatccacatatgtcttcgtcccatccggcgcgtactggctgcgcatcatggttccgtctctccgtccaccgctggtctgtccatacagtgcataggtgatcccgtcaaagatcgttgtcttacctgccccggtatctcccgtgatcagaaacagaccctgctgcacctgcccgaaatctattgtcacgcagtccgcataagagccaaatgcggacatcgtcagtatcatcggtctcatccttcttcctccctgattttcgcaaatacttcttccagcactgccgcctcttcttcctgcagcttccgtccctgaatctgggaaaagaactgttcaaaaaccagtttcggatctgtctgtgtatcctctgcctgtccgtcttcccattcctgtacaagcttccggtttctctctgtcctcacttccagaatatgcgtaaagatccgttccagctgttccttcggctgatacagttcctcttcatccgtcagaacaatactgacataatcctcgcagatactgtctttgttcgcttccagaatctcttccagtcttcccctgatcacgcatatctcccgtaacggatgcagcggatgcagctgaatcaccggttcctgtcccggtgcttccagaatcacttctgtcaccgatttttcctgttcccactcactgaccgagtattttaacatcgaaccacagtaacggatactttctcttcccatcgactgcgggcggtggatatgtcccagtgccacataggaaaacggcgcaagacacgaaatatccacctgatcaagtcctcccacacttatcgtctcggaatcactggttttcggtgtctcaccacctgcagtatagaactgatgggaaatcagtatatttcgtttctccgtatccacctgctctctctccagaagaaattttaccgcctcattataatccctgcgtatctcttcccatccgtttttcacttttatctctgtttccccgtcgcggtctctttgttctcctgctccgtcctctctgtctgtttcctttttgctctcttccattagttttcgcacatatccgggtttcacaaacggaagcatccatacctctgtctctccccattcatcttgaaaagtgacctttttcagatggtcttccggtatctgtggacaggttcccgccacatagatctgttgtctgctcagaatctttgcaccgaacgccagtcgttccggagaatcatgattcccgctgatgatcagcaccggaatcttcggttccagctggcttactttggtaagaaaccggtcaaataccgtaaccgcttccgctgcaggtactgatttgtcatacacatcaccagcgatcaggacaccgtccggtcgtttctcccggatcaattcataaatctctgtcaggatccactcctgatcttccagcagagaatatccatataactgcttcccgatatgcagatcggataaatgaaaaaaatgcattgcctcgccttctttctgttagatttctaaaactatcgcggcagtcgtcaaggtctcgtgtaaactataaaattccccacacaaccggtcattggccggatggcagggaattttgatcctttattcttgctcctgtgtttcctttttctcttcttttgtttctgtcacttctgcaacctcttcctcagatgcttcctgaacctcttctgttacgttggcatcctctttctccagttccctggtcagttccagtggtgtgatattctccggtgttacctgtgttgcatgctccatcagacttttcttctgtcctgcttttttcggttgaacggaagttttatctgcttcctttccttttttccgattgttcggttctaccgcatagatacgatccggatgatttttcgctacctttttcaggccactaaccgcccagagcagaaacaacggtaacagcagattggaaatgatcataaacggactgatcatatgcattgctgtcagtgcaacacctgccagaacttcgagccccagaattcccaggctcattttccacaaaagtgcaaccttatccagccgattgtttaaccggaaacaaaagattcccaccatggtttcgatcactgcctgaatataatatactacgctgcatgcgcgaagtgttccgcttgtaatgtcaatctgttttaatgcctccagaacatctttattccccttgtccgccattcctgccattgaccagcaccgtataccgtaagacaggctggatgtcagagctgtcataacaagcatgattcccaccagcataacgatcatcttgccgttaagggcccggcgcatttccttctgatcctgatattgatacatagttttcctccgttctcctgtttctttttcactgtccgtaactgctttataactttacagttaccactatttttcaattttaatgaagaatcttttgtttgtcaaactgaaacagagactttattctttttttacatttgttttcttacgatccgatattcatcgtccagctgataatacggacactggtaaaaagtatcacttaaaaatcgatacatctcatcttcatccagatccacttcgcagcagtagcaatcggattcttcatcgtatacataattcgcacaactctcacagtttgtctgtcctgccatcacttttcccccgttttcttatttgcagtcctttttccggctctgccttcgctgtgtagaaagccctgttttttattatatccgctctcttactccgatacaagtggaaatctatttttccatcccaaaataaaatgcttgctttttatccgctgatatgatattataaaggtcggttttagcaaaccgtttttcatgccgctgtggcggaattggcagacgcacttgactcaaaatcaagcggttaacagccgtgccggttcgagtccggccagcggcatccgagctgttgcatacatcatatgcagcagctttttctttacacggatgtatatttctgctaataaaatcgatccaccggattaattattgatattcaccgaaaaaaatcccctgttggaaatcctgaacttccacaggggatttttctattgtatatcaataaaacataattcttcctgttttcctgtaattagtttacgtgaatatgttctcttgatttttctgcgatctctgctttgatcttttctacaaaagtatccagtggcagaaccgtagtttctttttcgccatgcagacggaaggaaacggttctgtcgtctttttcattgaatccgacaaccagcagatacggtactttttctacctgaccttcacgcatacgatagccaagtttttctgcacggtcatccagttccacacgaacatctgctgcttccagtgcatccacgatttcctgtgcatatgcattcagaccttcatcatcggtcttaaccggcataacacgtgcctgaacaggtgccagccaggtcggcaggtttcctttggtctcttccagaatgtatgccatgaaacgatccagagatccaagaattgcgcggtgcaaaacaaccggtgtctgtttttctccgttgctgtcgatgtaggacagattgaatttttccggcaggcagaagtccagctgacaggtagacagggtaatctcgttaccgatggcaggctgtacattgacatccagtttcgggccatagaatgcagcttctccgatttcttcggtgtattcgattccgatgctgttcattacatcacgcagtgcatcttctgctgtgttccacatctcatcatcatcatgatatttttctttgttttccggatcacgcagagacagtacacaacggtaattggtgattccgaaatctttataggtactgaagatcagttctactactttggtaaattcatccttgatctgttccggtgttacaaacagatgggcatcgttctgacagaaatgtcttccccgttcgatacctttcagcgttccgctgctctcataacggaagtcatgcgcaatctcaccgatacggatcggcaggtttttataagaatgtcttttatttgcataaatcatcatatgatgcggacagttcatcggacgaagaacaaaagattccccttccatctccatcggcgggaacatgttctctttgtagtgatcccagtggccggaagtcttatacaggttgacagtaccaacacaaggtgtcataacatgcagataacccagtttacgttctttttccttgatgtaattttccagctcctgccagattgtatatcctttgggcaggaacatcggcagaccacgtccaaccagatcgtcaaccatgaacaaattcatatcttttccaatctttctgtgatctctttcttttgcttcctccagtaactgcagatgtgattccagttcttctgcggtcgggaaacatacaccgtagatacgctgcagcattttgtttttactgtcacccttccagtaagctccggagtgacgaatcagtttaaaatgtttacaaagttttacattatccacgtgaggtccacgacacagatcggtaaagtcaccctgatcgtaaacagtgatatttccctcttccagatctgcgatcagatccagtttataaggatcatcggcgaacatttccagtgcttcttctttagacacttcacgacggatgatctttttgccggattttacaacttttttcatctcttttgtgatcttttcgatgtcctcatcacgaattacatcctctccaagatcaatatcataatagaagccctctgctacaacaggtccaacccagaactttgcctgtggatacagatgtttgatcgcctgagccattacatgggcacaggaatgattcagtgtttttaactgttcatcttctttaaaatttaccatttttcttctcctttttaccattgtcagcgagaaaaacacgctattgcggcagtagtcaagattccatgaaagaacagactttaactcattacctgagtaacgaaaaaacacccttagatgacagactgccacctaagggtgctattatgcacggttccaccttatttttctcttattgcctgtaacagagcaacccggtaacgcttcggatgaaatctcatccttctacgcacaactcagaagtggttttcctgcaacctgtccataagaaacttccaccatacatttctctctctgtaaagatctgactgcattactttcttcgtcaacgctttttcatactattttctaaatcgagttcattataatataataccgatggaaattcaatgcttttttactcaatttccacttcgtttcctgttctttccccttttgtaaatgccattgcattattaagagttgtctcactgatcgcatccagtgcttcataagtgaagaatccctgatgagaggtaataataacattcgggaaggacagcagtcttgcggtaatggaagtctccatgatttcatccgaacggtcctcaaatacatttttcttttcctcttcgtatacatccagaccgacagcaaagaattttcttgcacggatgccctcgatcagatcagctgtttttaccagaccgccacgggaagtattgacgagaatcacgccgtctttcatcttctggatggattcccggttgatcatgtggtaagtttcatccataagcgggcagtgaagggagatcagatcactctgtgccagcagttcatccaaagatacataggtcacaaaatccagtgccggattctgatatttatcataggcaatgacattcatgccaaatccatgacagattctcgccattgccgcaccgattttaccggttcccacgataccggctgttttccggtagaaatttactccctgcataccaccaaggctgaagtcgttttcgcgaactctcacataggctttgtggattctccggttggcagccagtgccagtgccatcgcatgttctgctacagcttccggggaatatccgggcacacgcatgactttgattccacatgcggtcgctttctccacatctacattgttaaatcccgcacagcgcatcagaatcaatttcactccacgcgcagacaggacatcgatcgtttcggttcccacatcactgctgacaaatgcacagattgcatcgtatccttttgccagttttgcagtacttggaaccagttcagatttcagatattcgatctgaatatccggatagtcttttgcttttgcttcaaaagactctttatcataactttttgtatcataaaataaaatcttcacagcatgttcctccttttttctgtcttcttcatacagaaacattattttccagacagttttctgtctttcttattatatcctttcttctttttcctgtatacatttttttagaaattgatagatttcctcatcagtaggcggacatccctgcagacaggaagcaaaccccctggtgcagctgccgattccaagcgttcctgtctttccccgatatccctgtccgatacatatctttgtatccagtttttccagaacgccttcttcttttaaccggtcgagtgcagggatcagatacccgtaacaggcactgcaggactccacctcctctacggcatccgctacttccactacttttctccttccggtctttaccacctgtgaaaccggtggattcagttcccggatccgggcctgtgtccagtctgcacgtccggcccccagtgcttctgccattcggatatacggcacttcttccaccccataccccatctcatggcagacaaatgcatcaaccagtaccggatctcttccggcgatcaaacgattcatctccaccggattgcctccgtcctcaaagtcccagtccccgcagatattgtcaaccagaataaaatcctgatgcagcccgactgccaggtgtgcaatcggtttatgcagtcccatcgcgtgaaaatgacgtttttcccggtttggaagcagtcccttcatattcttcagtgcacaggtgatcttcgtctggcaatgccccttcatcaccggtacattgatcagaaaatcgagactttttgcctcccggcagatctcaagttccatccctccgcactccgtcagttctccgggatctgcctgcatatctttaaacggaaccttgtacatttcactcaacttctcatatccacagactttcatggattctctcgtcttatcccctacccaggaaccttccagcatgatgatattctgaaatcccgcttcctgcagatattcgatgattccagccacaatttcaggatgagttgttgcccccaaaaaagcctccgacggagccaccaggttcggcttgatcccaatctttttgtccctcgctccgatctgtgcttccagtccggcagcatacaggatctcttttgtcatctctttatactctgttccatgaatcaacagcaattcttctttttccatatctgttcctttctgtctgctttttacgtaagagtcaaaaaaccccggagttcaccccggggtttttatttttctgttttatcgtaactgttcagtactctcgcagaatgctacctactgaatagttgcgttttatcttcttttcaggaaatccggaatctggatatcttttctcggaacagtactgctggtcggtgctcccggatttgcttttggcatctggaagctcggcatcgtcataccctgggaaaatgcaggtttttccggtgctgcttcttttacctgtgcagtctgtactggctgagcaggtactgcagaagctttgcttacgcttgcctgttttgcagttgcatcattcagtccggttgcaataaccgtgatcttagcagaatctactgcggtatcatcatacatggcaccaaagatgatgtttgcatcttcgcctgccaggttctgtacatagcttgcagcatcatttgcatccatcagggagatatctccggagatgttaatgatcacatggcttgcaccctggatggttgtctcaagcaacggactggatacagcctgctgtacagcttccagtgctttgtcgtcgccctttgcctcgccgataccgatatgagcgattcctttgtctttcatgacagtctgaacatctgcgaaatccaggttgatcagtgccggcatgttgatcaggtctgtgatgccctgtactgcctgctgtaaaacttcatctgctttcttcagtgcttccggcatcgtagtccgacggtcaacgatctcaagcagtttatcattcgggataacgatcagagtgtctacgttgtcttttaatttatcaattcccatcagagcattgctcatacgggtttttgcctcaaaacggaacggttttgtcacaacaccgacagtcaggatgcccatctcttttgcaatacctgcaacaaccggtgcagcacctgttccggttccgccacccataccacaggtaacgaataccatgtcagcaccttccatcagctgacggatctcttccatactctcttctgccgctttttcaccgatctcaggctttgctccggctccaagaccttttgtcagtttctcacctatctgtaatacggtaggagctttgcaaagagtcaaagcctgtttatcagtgtttaccccgataaactccacaccgccaattgtttcttctaccatgcggtttactgcattattaccggctccacctacaccaattactataatctttgcagatgattccgcttcatttgtcataatctctaacaaagtacttcctccttttttgcttgcgcttatatttattcccttcagggtacttttgccttatcttaaagagttacatatggttatataatataatttcttctctgattaatcaactatttttttcagatttcatgttttttttcgaattttgtaaggtttttccggattttgttttcctgcggtttactcccccgcagttttctgtgtctccgacgtatctgtaccgttttgtgctgttcctgccccggtgtccgtcatccccccgtcttcttcggtagtactgttatcgcttccgtctccggatccgttgtcctgtgtgctgtcatcctgtgtctttgtatcttcaccggaagcatcagaatcaggatctgtcacggtgtctccttgtgtatcactttcatctgttgcagaatctgtgctgccctctccctctcctgccggatcctgagatccgtcttcagtttgtgtatctgccgccggatcttccgtatcttcgccgaagtctcttccctcaatctgtgcaatttccattttcagtgtatacagcgtctctttcgaaaagataatgttggtaatatccgtttcataatcttccaggtggagaatacctgtaaaatcagataattttggaagaattgccgctactctggtaatcttttcctccagcagcgtatcttttcccaaattgcagtggatgtttccattgttatacaccagaataatctcctgattctcatcaaaacacaccatctccggaagaatttcatacttttccaccatacgggtgattccaagaattgtattatagataccatctgcaatcgccggaatcgtatctccgagtgcgatacctttttccttgtctgtgatgccgataactcttggcacatctgttactgctgccttaaattttgtcgcgttttcattcccagtatcagactctaccgcctgcagtacctgtccctctgtactgtctgcctgttgcgtatcactctccgtgccatcttctttctgtgtatcttctgtatctgcctcgtccgttgtatcggcactttctcctgtcagagcttccagtgccgcatccgcttcttttgcggcagcttcctgtgcggcctgctcctttaactgattcagttcttcttcttcctgatccatggaatcaatttcatcctgctccatagcagtcacttccaccacaagtccgtccttgttaaaatacagcctctctgttccctgagtgatataaccgacaatttttttctcatttacatggatccgaatggtatgggcattgactctctcaagatcaaaagaatccacaaacggaatattttctgcatttttatgtctttcaaataacatcgcaagcaccgtgttagatgtcaatggtgttgtcatcacatattcttttacttcttcatcggtgtatctggtatttcccaccacatacactttgtctacccgaaacaaaaagaaaaatgccagcagagccagcagcacgatggctgccacagctccggctgtaatcatttttccttcttttgtcagctctattcttctgaatctttttttcattcttccacctgttcccttattctgattaccgcacccaattgcccgaacaactgatccggtcgttcatatccccgttctatatactccgcatgtttcacgacgctttctccctgtgctgaaagccccgccaccacaagcgcagcacctccacgcagttctctggcacataccgttgtccccgtcagttttctgccaccacagacaaccgcctgtctgccggtaaccgtgatcctgcctcccatttttctcagttcttccactatctgaaagcgtttttcaaaaatcctttcttcgatcctgctttctcccggaactgtaagaagcaccgacatcagaattgactgcatatccgtgggaaatccgggatacggcatcgtacacacctgctctaccggaaaacgaattccggctgcattcgcccttagtgtaccactcctcatctcccattgtccacccattttctcatatacccgaagtacagatttcatttcctgcggatccacatctttcagaccgatctgacctcttgtggctgcagcagcatacagacaggttcccgctacgatccggtctgtaggaatcgtatattccacatcccgcaaagccgcggctctgcgcatccagatttttcttgttccaatcccacggatttccgctcccatcgcctgtaaaaaatgacacagatgcataatttccggctccagggcacagttttcaagaagcgtttccccccgtgccgtaacacctgcaagcaaagcattttccgtagcacccacactggaaatcggaaaatgaatatgtgcaccggaaagaccctccggacattctccgcagatctccccctctgtttccctgatcaggacacccatttttttcattgcatccagatgcagatcaacaggacgtgccccgatcgtacagccgccgggataaccgatccggatccgcttacatcttccaagcatacttccgagcagcaggatggaagatcgcatcgtgcgcgtctcttctccgggaataccggtctcacagatcttattacagtccagctccagtgtatggccactccacgcggtctttactcccatcgaccgcaggattgcttccatttcaaacacatctgcaatccggggacagttgtgaagcacggtccttccctcatgcagcactgcagccgccatcattggcagggcagcattcttcgatccctgaacctttacttctccttccagcggaccatttccacgcatccatatttcactcactcgtttgctcccacatgccctgttatcttattctatgcagcacgggaatatctggtgactgacaatgcaagccccatctctcccatcaaaaacaatacagatgttcctccataactgataaacggcaatgtaatcccggtattgggaatcgtatttgtaacaacagcaatattcaggattacctggagtgcaatatggcccatgattccggcgcctatcagttctcccaacagatcctctgcccgaactgctgccaccatgagtctccagatcaggcctccaaacagaaggataaccagtatagctccaaacagtcctgtttcctcacagatgatggaaaaaatcatatcattttgtgcttcgggtacaaatcccaatttttgcagactgtttcccatcccacgcccgaagattcccccacttccgatcgcatacaagccctggatcgtctgaaaccctttttcatatttttccggatccctccagatggcaaggcgttcaagccgataactttccatactcaaaaaaatcgcgacaaatccaatccccgcggctccgattccaagaaaaggcagatacctcgggtgtgccacaaagatcagaatcacgccgataccaagaataataatcgccgtactcagattatttgttcccaccagcccgacaatcggtaacagcgccgccatcgtccggagcataaaccagagactgtctgtctttttcttccggttgctgatcctgaatgacagaaacagtattaccgctgcttttgcaaattccgccggctgaaacgacaatggtcccagtgccagccagcgttttgacccattataggatcttcctacaaataagacagccgtagacaacgcgatggaacacagatacagtaccgtggcaaaagccgccacccgatgataatcgatccgtgccatcacccaaaaagcaatcatgcccagcacactggcaaataactgctttttcagatagtatcctgcatctccaaactttacttttccattatatgtacctgtactatataaaaaaaataatccggccagtgtcaatatcgctacgaaaaggatcagaagctcatcttccttcccttctttttgtacttttttcatagattttacacgcttttttttcagtctatgaatcgcaaaaatattcagtacttttttaataaatttccattgacaaatatcgttttttttttataattgattttaataatagtaaacacagaatttagtaatacgatactttcccgattatcggtaagacggggctctttacctgccacatggctgataatcgggattttcgtgtgccttttaaaggagtttttatggacattggaacaaaactgaaaagtctgcggacacagaatggactgactcagcaggaactggcagaccgggctgaacttaccaaaggattcatctcccaggttgagcgaaaccttacctcaccatccatcagtaccctcgcagatatcctgcagtgtctcggcagcagccttcaggaattttttacagatgacacaccggaacagattgtctttcgggaagaagattattttctgaaagatgatcctgaacttggacaccagattgaatggctggttccaaacgcacagaaaaatcagatggaacccatccgtatgacccttgctccccgggggcgttcctgtgtggaaccccctcatgcaggcgaggaaatgggctatgtgctggaaggaagtatccttcttacgctgggtaagaaaacctaccgcatacaaaaaggagaaacgttttattttcccgccggccaggaacactggctggaagctggaaaatggggtgctacgatcctgtggatctcctccccgccaaatttctaatgataaaaaggaggtaactgaatagttacaaaaggagatactatgagcaatcgattaatagatttacagcatattaccaaaatctttgacggtgaaaagattctcgacgatctgaatctctatatccgcgagaacgaatttctcacccttctcggtccgtccggctgtggtaaaactacaacgcttcgaatcatcggcggttttttatttccggatgagggaagtgttatctttgacggaaaaaacatcacacagctggctccgaataaacgccagttgaataccgtatttcagaaatacgccctcttcccgaatatgaacgtggcagaaaacattgccttcggtctcaggataaaaaagaaaagcaaagcctatattgatgacaagatcaaatacgcactgaaactggtgaatctggatggctatgaaaagcgtaaaatcgatgctttgagcggtgggcagcaacagagaatcgccattgcccgtgccattgtcaatgaaccgaaagtgcttcttctcgacgagcccctgggtgctctggatctcaagatgcgccaggacatgcagtacgaactgatccgtctgaaaaatgagctgggaatcacatttgtctacgttacccacgatcaagaagaagctctcaccatgtccgatactattgtggttatgaacggcggttatatccagcagatcggtacgccggaagatatctacaacgagccacaaaacgctttcgttgccgattttatcggtgacagtaaccttttaggcggtaccatgatccaggatcgtctggtggaaattctcggtgccaaattcttatgtgtagatgagggcttcggaactaataacccggtagacgtagtcatccgtccggaagatctagaactggtgaaaccggaagtcggtattatcaaaggccgtgtgacttccgtcatcttcaaaggcgtacattatgagatgactgttctggccaataattttgaatggctggtacacagcacggatatgtatccggcagacagtgaagtggggatttttgtcaaaccgttcaatattcagatcatgcataaaccggaatctgaggatgaaaaggcggtggatattaatgaatagtcctaaaaaaacctggtttgcttttccctatattctgtggatcatcggatttaccctgatcccactgggactggttctctattacgcatttaccggcgcagacggtagttttactctggcaaatgttctcgccattacagaacctgtacatctgaagtctctgtggacttctcttaaaatggcgtttcttacgactttgatctgttttatccttgcttacccgctgggactggtgctatgcagtttgaatctgaagaaaagtaatttcatcatttttctttttattcttccgatgtggatgaactttctgcttcgaaccatggcttggcagctgattctctctaataacggcgtattaaatactctgcttggcttcctgcatcttccgaaggtgcatattatttataccttccaggcagttttaattggtatggtttatgattttctgccatttatgatccttccgatttataattctctttcttccatcggagacgatgttgtggaagccggaaaggatctgggcgccagctattttaccattctgcgaaaaatcattttcccgctgtctcttcccggagtcatcagcgggatcacgatggtatttgttccgtccatgacttcctttgttatttcaaacattctgggtggatccaataccttactgatcggaaatatcattgaacaggaatttacctacaattttaactggaatctgggcagcggactttcctttgtactgctggtatttactctgataagtatggggctgatgtccgtctttgataaatcagaaggaggaactaacatatggtaaaaacatgggccaaacggctgtatatggcattcatctttctgttgttgtatctgccgattatcgttctggttgtactgtcttttaacaaatccaaggccagagttacctggcgtggatttacttttcaatggtatgcaaacctttttgataacagtcggatcatggatgccttcaccaccaccctgacacttgctttcggctctgcactggcagccaccattatcggtgtggttggtgccatcggcatcagcgcaatgaaaaagcgaaattactctatcatgctgggagctaccaatatcccgatgttaaatgccgagatcgttactgcattgtctctgacactgttatttatccgttttatcaaattgggatttaccactgtatttatcgggcatgtgacattcggtgttccgtatgtgattttaaatgtcctgccccgtcttcggactctcaataaaaatgcatatgaggctgcacttgatcttggagccaccccgctgtatgcctttttcaaagtctgctggccggaactgatgccgggcatcatgtccggttttctgatggcagccacaatgtcgatggatgattttgtgatcacctattttaccagagggcctgggatcaacaccatctctacgatggtatattctgaagtgaaacgtggaatccagccggaaatgtatgcactttccacgctcctgtttctgctgattcttgttctgctgctgctctttaacttcttatccggaagaaaaaacagtatggaggtgtaaaaagagactcatgaatatgaaacataaattactgatagtatctgtactttccggatccctttttcttcttggcgggtgcggctataacaaaaataattctttggttgtttttaactacggagattatctggatccttccatcatcgattcttttgagaaagaaaccggcatcaagatcctgtatgaagaatatcagtccccggaagaaatgtatatgaaatataaggcagatattgtggactatgatgtaatctgttcttccgattatattctggaaaagcttcgtacagaagatgaacttcttccgatcaactttgacaatattccgaatgctgccaatgtagacgaacatctctgggaattttcgaagacatttgaccctgaaaacaaatatacgattcctcattactggggtacactgggcattctttataacacacgtctggtggatgaaaaggtggattcctgggatattctttttaattcaaaatacagtggccagatcatcatggaaaacagtgtccgggattccttcgttcctgcgctgaagatgcttgggtattccattaatacagataattcggatgaactggatgaggcagaaaagattttaattgaacagcgaccgatggtacaggcgtatctgctggattccgcacgtgacgaaatgatcgctgaaaatgctgctatcgcactggtgtattccggagaagccccttatgcaacagagtataatgacgatctggcttatgtggttccgaaagaaggatccaacgtttgggtagattcctgggcagtcacaaaggattgtaagaatatggaaaatgcggaaaagttcctgaattatctgcttcgggtggatatttcaaagatcagttttgagtataatcattatggaacgccgaataaaaagctggctgagattctgcctgcaaagtatacgaaggatccggcactgtttcctcccagtgatgtgctggataattgtgagattttcaggtcattggaccgggggacgcaggattattacagtaagttgtggaaggagattaaactggactaaatagtttgattttttccttacgccggacgcaaaaagcaacggaatccaggggctggcagcgtgggcagggcaactttgagctagtcgctaacttcggctatattcacgagggtcaactgaccctcgcgaaagcctgcgtaagcgccggatctcaaagcttgccctaaacgcccacaaagtgctgcctgcccctggattccgttgttttttgctgttgtttggaaggggaaagccagattccgcgcctaatgtggaatctggctttgattttttactgtttctttgattataatttgatgatttaaattattttaatcttttcaaattattggttttgcttttactgtcttagatatttgtataagtttatctaagaaaaatggtaactattcagtagccactgtcccgcgagatgttttgacatgaatatgtcaaaatcccgagacatactagagcgtgtctgaaaaaggcttttcgtgagctgcgagtcccagtttgtgggagattttatccgaatgagggcggcgtagcgggctacggcaaccgaatgagggtaaaatataccgcaaagtggggcttgcagattgcggaaatgatttttcagatacgctctagccaaaatgccatcaccgaaggtgattttttatgcattttggctcgtaactgtgaaggtactgaacagttacgaaaaatgtatttttaccccagatccaggtttcggatatcttccgggatgggagctgtcaggtggagtttttcgccggtgtagggttgatacagggtgactccgtaggcgtgaagagctgcccggtggagttgggtctgatctccgccgtaaaggggatcgccgagcagagggcacttcaaggttgccatgtggaggcggatttggtgggttctgccggtttccaggtggagggtgaagcattggttggctttgccggtccagagggatttatagagggttctggcgggtttgccgagaggagtaggaatcatgcgcagacggttttcaggatcaggagccattggagtgtcgattcgagtccatccgtcctgatctgccgttgtctcgtattcttccatccgccggatgatttcacaccatccggggaatttttccactttgtttttttcttcgatgtctttcttatgttttttgatatcatcgttccattttacagaaatctctgtcacggcaagataggttttctgtaattctccccgctctctctgtttttgcagtctggcggctgcggtctggtttttggcgaagagaacgatgccagaggtgtctttgtccaggcggccgatggggcggacggtgtgggactcctgccgaaaagcatagtaggcacttacctggtttgccagggtgtcttcatagtggccgccctgagggtgagtgaccacacctgccggtttgttgacagctaaaaggtcctggtcttcgtaaagaatatccaggacctctgtattgactgccagatgagcggaagtctgtgtttccgtctccaacaggatctctatgatatcaccgggcagagttttttctgtgactctgcaccgggtaccatttttccggattccgtcaggaaggaattttgcacggctgatttctttttttgtgaaacctgcctgttttctcaatacttcctgtacgattcctccttcttccacctgaaggctccataccctccggctctcgttacgcatctgcttccggcagggcgtatacatattctttgaacatccgaccacgctgttcgtagttgtcgaactgtccccagcttgcacatgccggtgataagagaaccgcatcgcctttgtttgctttttcggcacagatctttacggcttcttccagattatcagccagaatcgtattcataaatccacacttgtgggcggtctcttcgatcttttctctcgtctgaccgatcagcaccaggaaacggacttttccgtcaaaagcttcgatccactcgtcgtaagaagactgtttgtcatatcctccaccgatcagcagtgtcggacggtccatggcctggattcctttgatagccgcatccgggttggttcctttggaatcgttataatataccactccgtttttctctgtcacatattcgatccggtgctctactgccacaaagttttccacactttttttgatattttccaccggaacacctgcataatatgccatggctgctgccgccattgtattttcgtggttatgtcggccaaggatcttcaggcggtctgtagtcgtgatcacgaattctttttctccggctcttaaaacaatctcttttcctctcaggaaaataccctgtggaagttctctgaggctggaaaaatagacaacttttgctttcacctgtccgctttccccgaaagttctcagcacctcatcttcataattcagtacacagacctgatctttggtctggttgccggtaatcagttctttcacacggatatattcttccatcgtatgatgacggttcagatgatcctctgtgatattcaaaattgcactgactgcaggctggaagtcctggatggtctctaactggaagctgctgatttccgccactgtcacagtctcttcttttgtgtccagagctacagaagtatacggtgttccaatatttccaaccacatagacactgtccagataatcactcatgatttttccaagcatggcagttgtcgttgtctttccgttggttcctgtgatcgccaggacttttcctttacccatctgataagcaagttctacctcaccccagatcggaagtccctgtgtgcgaagtgtcttcacaatcggaagatccgtcggaactccaggactcatcactaccagatccagtgtttttctcgcctcttcagacagttctccgagaataatatccacattctccggctgttccagtctggctttgatcgcctccggatcctgtttgtcgtttccatcataaatcaccggacaagctcccactttacagagcagatccgctgcaccgataccgctaataccggcgccaaatactaatacacgttttccttctaacttcatgattctctccccgttctttcaatgtgcttagagtgccagcagaccaatcatacacaggattgctgtgataatggagaaaactgccacaactcttgtctcagaccatccacacaattcaaaatgatggtggatcggtgccatcttaaagaatctctttcctccggtctttttaaaatacgtaacctgtataataacagatgccacctcaatcagataaataaggcctaccagaatcagaaacagcggcatctgcaacatgtaagcagtacctgcaacaaatcctcccagtgccagtgagccggtatctcccataaatactttcgccggaaatacattgaacagcaaaaatcccatcagtgcgccgacaaccgcacaggtaatcggttcaataccgctttgtgttcccactgccactaccgtaaagaatgttgccaccattacggttacgctggatgccagaccatccagaccatctgtaaagttgacaccgtttaccgtaccgatcaccgctacaaataaaagcggtactgccacccagccgatattccagtaatatccatgactgaaaggtaccaacagtgtcagtttaacgtcagtaaagcgaatcagataaaaagcaaaaattgcagttaccacgatctggcctgccatcttctgtgccggaagcagtccatcggagcgtttcagcacaaccttcagataatcatccagaaatccgatcagaccaaatcccagcgtaagaaataagatcggaatgatcttcggataatcttttatataaatcaaagatgtcactgttactgcaatcagaaagatcagaccacccatggtcggagttcccgccttggaaagatgggacttcacaccgtcggtacgttccgtctgggatgctttcagtctcctcagaaacggaataatcactggtgccagaatcacactgatcacaaaagaaataatcaccggtatcacaattttaaaatccatacttcacctcgtacattatgaacatttttctgttcagtttttttacgttctaagtataatacttttccctctattcatcaaccgttattccacacgcttcacacaaatgcttccgaaaattccgtgattctgtcattctgttttgctctcctccgtcacgactgctgttttatctattcccagatacggcagcacattctcaaaaatcgttttcatcaccggggctgctattgttccgccataatagattccctgcggattatagatgatacagaccccgaggatcaccggatcatcggccggagcaaaaccgagaaaagaggaaatataccggttggcacttctgggcaatgtctgagaagtagctgttttcccgccgatccgatatccttccacctgcccgttttttcctccaccctctttcactaccatttccagggcatagcgcattttctccgatgtctgccccgaaagaattttcttttttttctcatatgaatacgtttttatgacctttccatcccggttttgcacctttactccgaaatggggggtgattctctccccaccgttgatcagagaggcggctgtcgttgccagctgcagaggagtaatctggaacgactgaccgaatgcgatagttgccagttccacctgtccgatattttcttttttatgcataatggttcccgcttcccccggcagatcaatacctgttttttccaataaaccgaatttttgaaaataatcgtaatatttttccactcccagtcgtaataccacatcaataaaaactggattacaggaattttcaattccctgtacaaaagtctgtgccccatgtcctgttcttcttgcacagtgaatccgccgatcttccaccacccgaaagccaggacaggaaaactgatcctgcaacgttaccacaccggcttcaagcccggctgatgccgtgataattttaaatgtagaccctggttcatacgtgtcattgatacaggtatttcgccacatccgatttagcgcatccgtccgttccttccggtctgatacagtcacagactccggcagtgtgtacggatcattcagatcaaattccggtacatttacacaggcatagatttcgccgttttgaggattaagcagaagaaccgatactttctccgcttctttttgttccatcacacgttcagcctcctgctgagcatacatctgcatattataatccagactgatacagagatcgaatccctctaccggttcctttcgtttttccccgattccattttgctcgattcctcgggcatccgttgttgtgagaattgtcccgttgattccttttaacacttcttcgtattttacttccagtccgatgattccctgattatcccctccggtaaatccaagtacccgggaagcaagcccgccatacggataaaatcttcgaaaatcctcgtccacttttacgccggcaaactgatattcccggatcttatcccccacttctttttccacatttgtttttactctttcgatcgaggatattttattcacccgttttcgtgcttccacctcatcgattcccagctcttttgtcagcatcgcaattaccttttccggttctttgatctggctgtgaatcacggatatcgtacaaactgttttattatctgccagtacaactccgttcgcatcgagaattcgccctctcgcggccttgatcttacgctctctttcgtgcagatcatcggcttttttcgcataatattccgactgtactaccatcagattgaccaatcgccctatcaaaactgtcagcataaacatacatcccagaaaaaccaccagcgtttttttcttatgaaatgttttatttttcgccataaaaaaccccgcagaagctttccatttaatgtatggtcacttctgcgaggttattcgtattcctgtttttacttaatttccactttgtatggccgcttcttcatcagtgataccttcactctcctgcttattgtcaagcttggtttcactgtcatcctccggcggtgcagccgttgttgtatcatcggtgctgtcagactgtctgttggactctgcctgctgattgatcagattttccagataagtcatctttgcatttgctttatccgttacctcttcatcctggaaaatgttcagatacggaagaatctctgtcataacacctttataaatatactgtgcatacaggctgtctgcctgatattctgtatttggttcgtcaacaaccacatacacaaccacctgcggatcatccagcggtgcgaaaccgataaatgataccagatattttttttcctcacggggatatttctgtgcagttcctgttttcccgcccatgctgtaaccgtctaccttcgctgctgctccggtaccatcagactccataacagtccccatatactggcggatcagtgctgatacatcactggatacagtctgttttgttactacaggctgcacatctttgatcacatcaccgtcctcgttcaatattttactgaccacatgtggctgataataatatccaccattgatcacagaacagattgccgcaatctcctgaatcatcgtacaggtatatccctgtccgaaggaagcactggcaagttcggtacttcccgatgaaagactttcttcggtgtgaagtatacctgttgcttctcccggaagatctatacccgtagtagcaccgaaattaaatattttctggtacttcaggaattcctccggtcccagaagagcgccgatttgcatcaacccatcgttacaggaatgcttgatcagatctgacagggtttccgttccatgtgctcccggatagattgagcatctgattctggtcccgccaaacatctgataaccgtcgcagacaaacgtatccgatggctgcaccacatccgcatccaatgctgcaccaatggtcagcggttttaccgtcgatcccggttcaaaagcatcgctgatgcaataatttttccagataccgtaaagattcttcagcatcgtatcattatccatcccattgatctcatcctgcgaataataggaagtaagatctcttggattgttcagatcatacgggttatccgtcgccatggcaagaatctcaccatttttcggatttgcaacaatgacacctacatttgccgctccttcggcccctctcggaccatttgccataccatccataaaattgctgatatatttttctactacctgctgaatattaagatcaatggttgattccacactgttgccgttaatcggatcgataatattctgttctacatcagcatctgagttgtaatatccgaactgtcttccgttaactccgttcagagtactggaataataaccttcgattccccagtccgcgctgtttcccgtatacgtaaatccaaccagatgactggctgtggaattcaggggatatactctccggtaatcttcttcaaaccatacccctttgatgttcgaacgctctgcaatttcttcttttgtcagtttttcttttgcttcttcgccggatacatcggtataatcttcaaatgctttcttctgattgatagaaacattgctttgcaaaatctgatactgactgtcttttgtagtctcatcttccagtttctttcgaacagtttcttcatccagccccatcacatcaaccagcgcttttatggttggttctacatattcttcttttgtgttgactactttgcagtccagaataactttatatactttctcactggtcgccagtacaaccccgtttctgtctgtgatatctccacgtttgaacggaatcacacggctgtcgtacttttgctgcgactgacttaatacctgtttgctgtactgatttccctggctggcattgatcactgtgattcgtatacctaaacctacgaaagccagtacgaccattccaaacagccataccagcttcatacgcatcttactatttatctttcttgttaaaaggggattcccccttttctttcttctctttctttgcacgcaaccaccttattttgtcgtatcaggtacatctttatactgacgtacataactgtttcctgcagtatcaaactgataaatctgatcttcctgcggataagtcatccccagttcgttcatcgccttatcttttatcttttccagatccactgatgaaatgacactgttgtacaatgcatcattgtctgctttcagctgactcagttctgactctgcagtggcaatctcctttgtctgtgtcgtgatcgcagacttcatctgcagataacggacacacataaacagagctgccgctgataccactgccagaaacattacataaccgcggctcatcgctctggttcttgctcgatttctggaagttgtccgacgaaccggtctcacttccggttcttcctgtggtatggcctgaatcttgcggacagtattaccatctatcacatactgttccactgttcgttccgatctggaatttacccttctgttttgctttctggccattgttgctgtctccttacttagcttcggatatctgacgttcaaacacccgcaattttgcactctgtgagcgactgttccactccagttcttcctcagacggaagaatcggttttcttgttatcactctgcccttggatacttttccgcatacacacacaggaaagttcggcggacaggtacatggattttcatttcttcggaaaatcgtctttacgatacggtcttccagagaatggaaggtaataatgcagatccttcctccgtcatttaaaaagtcaatcattccatccagcgaatcacgcagaacgtcaagctcatgattcagtacaatcctgagcgcctgaaatgttctcttggcgggatgtccgcccgttgcccggactttcatcggaatggctctttttataatctccgttaattctcctgtggtatgaatcggtgtctcctgtcttgccagacagatatgttttgcaatattttttgcaaacttatcctctccatagtcacgaataatcctgtacagttcactctcgctataagtatttacgatatcttccgctgttttggtctgccgctgatccatacgcatatccagaggcacatcctcccggtacgtaaaaccgcgttctgcatgatccagctgataggaagatactcccaaatccagcacaataccatcaacagagttgattccccttttttttaattccgggaccatgtggcaataattactgcgaatgatcatcgtgcggtcctgatagtcccgcagtcgttcacttgccgcctgtattgccgcatcgtcctggtctattcctattaatctccccgtggcagataataatttgcatacttccgaggcatgtcctgcccctcccaaagttccgtcaacatagatgccgtccggcttcacattcagattgtctatggtctctttcagtaataccgatttgtgtttaaactccatctaacactcttactccttttttcaccggatctagatgataattcccatctcctgcatatcttctgcaatcgcatccatatcatcatagtcattattttcactccacttcgccttgctccagacttcgatccggttcagattaccggtgagtaccacatctttctccagacctgcaaattcccgtaacgttgccggtaccaggattctcccctgtcgatccagttcacatgttgtcgcacctgccacaaagaatcgtgaaaattttctcgcatttttgtttgtaagcggtaaagcttccagtttcttctcaaagatcttccaatgttccataggataaatagaaaggcagccgtctaaaccctttgttaacacgaattcatctcccagttcttcgcgaaacttagacggaataatcaatcttccttttgcgtcaattgtatgactgtattctcccatgaacatagaatctaccctctttgagtgccggggaattccccggaatcatgaaataaacggttctccccaaccttttatttcaggtgctttctggaatcggctgccacacactctccctttcgcaccacttttctccactttctaccacttatgctctttattctaaaccaaatgcagtaagaatacaaggggaaattttggaaaatttggaaaaaaaatgaggaaaagcttatcttttcctcatttttctgcatttgtaactgcccggtaccatcgcgggatactgcctgtcgaacagttgcctatatttttttctgtttattcacttatacattgaaacggaataaaattacatctccgtcttttaccacatactcttttccttccatgcggaccagacctttttctcttgctccggcataagaaccggactccagaaggtctttatagttgacaacttctgccttgataaatcctctctcaaagtcggtatggatctttccggctgcctgcggtgcctttgttcccactttaatcgtccatgcacgtgtctcatcctcaccggcagtcagataactcatcagtcccagcagttcataacttgcttttatcagtttctccagaccggattcctgaattcccagatcatccaggaacatttttttctcatcatcttccagctcggcgatctcctgttcgatctccgcacagataacaaacacaccactgttctgctcttttgccagttcccggacagcctgtacatgcgggtttgaagcaccatcgtctgccagatcatcctccgaaacatttgctgcaaagatgaccggttttgctgtcagcagattatactcctgcagccatgcctcttcgtcttcgttttctgtttccagggtaatcgccggttttccgtcttccagatgtgctttgattctctgctgcagttccagctctttcgctgctgtcttatccattctggctgccttggttgtcttggcaattcttctctccagaatctccagatccgagaagatcagctccaggttgatcgtctcaatatcacgtaccggatcaatctttccatctacatggataacattggaatcttcaaaacatcgaaccacatgaacgatcgcatccacctctcggatattcgcaaggaactgattgcccaggccttctcccttggaagcgccttttacaagacctgcaatgtccacaaactcaatcaccgccggagtcaccttcttggaatgataaaaatctcctaacaatttcagtctctcatccggcactgccacaatacccacattcggatcaatcgtacagaacggataattggcagattcagcccctgcctttgtcagtgagttaaacaaggtactctttcccacattcggaagcccaacgatacctaatttcattttctctatttcctcctgtaaatcctttgatttcaagggatttcagcatacttacttttgcaagtgggccatttagtgggccattaccttgccataagcgcttctgctaccaagtccatttcttttttcttttcttcctcggtagtatgaacatataagttcattgtaattccaatattcgaatggcccagtaacatctgaagtgttttcggtttcattcctgcttcaatacatctggtagcaaaagtatgtctcaagatatgcatcgaaaatcttgaaatttttgctttatcacagattttaaacagcgctgtatcatatgtactgttcttaaccggtgttccttttcgacacagaaacacaaattctttccattctgttgaaatttctgaaatcctcttattcttttctttttgtttttttagtatagcaaccgcttcttctgttaagggtatcgtacggtagcctgatttactctttggttctccgatacgccactcctttgcactataacgatattccatacttctgcgaatctgaattgttttggatttaaaatcgacatcttcccatttcaatcctaccaattcgcctgttcgcaatccggtttgtagtataaaacgatactgattttcatagctttgaccttctgcgtattgtaaaaatattttttgtatgtctcttgttaaagcaaccttcttctcagatggctttcccatatcacttttcacagattttttgcagggattgctacacaggacttcattttcttttgcatactcaaacatgttgtataatgcaattcttgcctgataaattgtagatgtacgatactcctgatctgccatatcataaaatattttctgacagtgaagtggtttcacgtctgatagtgtcatcttcccaattaccggtttaatatttttaatatatctctccgtataattgcgaacagtatttgaacggactgttttcttttttatcccaatccaataatcaaaccattgatcgaccagcatatctgatggcattgaaatatcactgtgttcatccacataagtcgcatcagcaatccatgctctgcactcttgcagctttttgaatcgtttatgttttctctttccaaaccgatctacaaatctggctgagtataatcccgtactttcttgggttattcctttgccaagttctttgccttttaaatcttttcccatatttcagctcctctcataagaagccctaatacagtaccttgtattataccatagcatcttatttttgtgaatattcattttcatctcatcttctgtctgaaaatgtcaatattaaatgcgacacttttttaacttttttcaactgattttccggatctcttcttcaaacagttcgcccgccgaatgatagccgtggatcttccgcggataattattcacccagctttcaatcgcagaaatttcttcatccgtttttccatcgaagtttgttcctttcggaatatgtcttctgatcattttatttgttacttcgttgcttcctctttcgtagctgctgtacggatggcaataatatgtctttgtcctgcttcctgctcccagtgctgaacgttcaattccttcactatctgcaaattcgcttccgttatccattgtgatcgttttgaatactcgtttgaacatatcgccccactttctttcaatcgcatccagcgcgttgacaactgctgccgccgtatgctctggcaacttcatcacaatttcatcgcgtgtttttctttcagtcaacacaagaagactgttctttgatttcccgcgctttccttttaccgtgtccatctcccagtgtccaaactcttcgcgtgtttcaatttcttccggtcttttttctatactttcacccgctgacgctcttgcctgcgttttcttgacctttttgtatgtacgtttcttattctttttaaccggaagatttttatttgtcaggtgcagaaagatccctttatcaatataactgtacagtgttgttgtgcagatcatcacgctgaattcgttttctttttgttgtgccttaatttcccccagtaccgccgccggactgtaatcttctttcatgatcttttcttcaatatagttcgccagtctgatgtcattcccaatcttcagacttccccctttgctcttcagattttcttcatatttatcatgtgcaatatcagggctgtatctttcttccgttgtcagatctgaattaagcgcggtaaaacgtcctcttttcaattctctatatattgtgcttctatgcacatgtagcatgtccgcgatctctttgatttttactcccgcttttatcaatgcttcaattctgatccggtctgcttttgtcaaatgtttgaacgttctttccatctccgctttctccttctataaaagaagccgcaggcgatgatcatgatcgtctgcggttccttgtaatttatacagccttatttatcccttaatattttttcgacaattagtttttcaatatagtcagggcaacttctttccccattttcccagtttgtcagcgttctatatggaatttctagccactctgacaattctcttctgctcatatttttctgtttgcgtgcttcttctattttcattctattcgcttccttatattctgcattctttttcaatcatttcattgataatgctttcgtcataccctcttccgtaatatttgaagataacgcttccatcgtcaaatactatccagtcacaattagtatcatttaaaattctatcaagtgcaacatcagtcggcagttcatgcccgaacattgagaaataaccagcagcttcatctattgatgcaaaactaaaaacttccccgccttcttctttgcatatcatgatataatcatgctttgtgtatccttttacagctttcattttctttgcaccccttgtcttttatttttttcctgctataatctaattaagcacttggggcggttagcaggaatgtttaggtatccgccccctgtgtgatcccttattctattttattttcttatttcttcaagtatcttgtcaatatgttccacggtatgtatttctccgtttgtccttgctacttctctaattgataccaacatcgctattaaatcggctttgctcatttcttcgttctccattgttttctcctttcctgctgttcccttgttacaattatattatatacccattgagcctatttgtcaatctttttttactcattgagctacttttttacaaagaaaaaacactatgattccatagtgtcatcttcttccagtagatcatcaaccgtcacattcagaaccttcgcaaatagcttcaattcgtaatcggtcacaaaccttgtccctatttcaattctgcttatactatcgcgttcaagtgttatcccttgcagctgaatcttcgcagccagttccatctgcgtcattctctttttcaatcgttcaatccgaatcctgtcaccgcatagattctttttgcctttataggtgtatatcttcatccttcattctcaatcccttgtgttaatgttcagcatcattcttgacattagcacttttttcacctatatttgtgttaatgatcagaattacagaaaactgatcaaatattattatataatgaagggggcttttcctatgtttggtaaaaaagcagatgacaaaatcgccaagaagcaggcggagcaggaagcaaaagacaaggcggctatggaaaaattcggtgttgatttcgacagttacacttcggacgacatcaaagaaaagaatgtcgcatcccttaaagaaatcgcatccagtcttgcaggttcaaaaatgtattctttcggaagtcttttaagtggaaattcaaatgaaactttcgcactggaaatgtcacgcgcacaggttgaacagaatttcattcttatgcgtcagaatgaagaaatcatccgcctgttgaaacagatcgcagaaaaataattttcttctctttttgtacatattgtcatcgcatagattccgatcagcgtcatgtatttgatctgttttcgtgatattgcataaaaggcagcgaccgttctttgatcgctgccttttcattattccattttcttaccttttaggtactcacaaaacagcttgtcttcctcttcgtccgctttcttcgctgccgctgttattgataacatgagaatagttgtcacagatccaaacgccgcagacacgatcgctgtgacgatgtatgataccggaaccatcgttattcctccggaataaattctgtgtgttctggatctcctgaaatccagtacccgtctgtcgtcttgtaaagtaccctgtcgccgatctttgctttcttctcgacattcttttcatcaaacatcgtcacgccacaaattgcatcgtcttcaaacgaaggtcttctgcgaaggcgaagtcttccatcaaacactctgcggattgttccatgtacttcttcttcgcttcttgctgctgccgccgctgcttcaacgtcttctactgtgatttcatccattatttctttcacttcttcagccggaacttcgccaactttttccccgttttcatcatatgcattcacagatccatccggtttttcttccagtgccgcatcatcaggaacgtcatctgtcgcttcaactttcaacggatacagctttacaccttcttcatcccatactgacaagccattcttttctgcttccttttttgcattctggattgttttgtatcccttatttgcttttttatcgaaagtgtttccaatataaaacatctgtttccctccttcctattttgctttcaggtaactgattgaactgaatccgatatactccactccatcaagcgtcacagtaatgtataaccatttcgttccattcgatgtattataatagccgtaattatgcactgtggttcctttcggaatacagcacaaagcctttttgttctttccagcgtcgtttctgcaatacagatcagctgttgtgacgtaggatcccgccagcttcttgttgtactctctcgcatagcatgttgacttgacggttttgctaatggtctgatctgctggctgtggcttcgtagttgttgccgctgctccattcagaattctgtttacctctttctgaatagtatccggatcataaccacttgcagaaagtgcttttcttcttgcttctccattcccccactgtcccgcaattacttcatgcgctacggttgacacgctctttcccggtgtatttactggcttgctttccgcctgatcactgtcatattttggcgtgataaatcctcgaatatatcttccattcagcgataccgttcttttctttacgctgtcgctgtaattgccttcggtaacgacaaaatatcctgctacctgattaacgtatgtaaccgttccaacatgatccggtgttccggtattgtcgcccacaccgttatcctgccaatcatacagcgccgcttcgcccagcttcggaacgtgtgcatcattttcttcccatacgcccatctgcttcgctctttcaatcagataatagcagctgatttcaatcggcataattgccgtatatttcaacgcaacggcaagtgctgaccaagtgcaagcgcaccacgcccatccatacgccatttttgtcccacgcgggaaggcacctgtgaagctattataaatatcaataattgatttatatgatccatccgcttcattttttccgatccagctttctaccagatccacaacagcctgtcttgaatacatttttgcaccttcttcccctgatttatccacattgtccacaacgtactgtttaatccaccgcacgcagcactgatgtctgctttcaaactttttatcccccacctgattatcattgcttgtatccttctgatccaagatcagcgatgcatacacggtatcaggtgtatatggttttttcgctctcgcaaaaattcgttttactggctttgaaccaccaagatgttctatttcgcaccacatcacctgtgcttgtatattatcaacaccgtatgcttcagcttcagcgatgtatttttccatcagttctttaaacaaatcatcctgacacttttttcctgcatccgttgtgataatagcaatcaatgcagctttttcttttgccgtcggatcccatcttgtagcttcccagtctaccgacagtttcttttcgattcctgctgtgtcagcagtcctgaaggctttcggatctgccttcaggatcatctgacacaatcttcgaccttcattcccgtaattttgcgcccagcctaatgtacacgttttttcattgtctgcatttgctgcttttccggcatacgcaccatattttctttttccatatgtctgtccgccggattccacgccgccgataatgttggtcaaaattgtcagatattcttttttcattactgttcaccatcctttgacacagatgcttttcgtgtcaaaacttcgattgcattctggatcactgtcggaagtggaattcccatcagtccggcattttccgtgatgctgatcaattcatttgccatgaatccaatgatcactgcattgcgaatataatttacacccagcgcaagatccagacggtatgcgatcaacacaaacagcaatgtcacaccttttctgcacagccccttccatccggctctgctttccaacgctccgttttctgtttttctgctgttgtgaaaaattcccgcaacaatcagccccgataaataatcaatcaccataaagatcaccaacgtcacaagtgcctgatcccatccaccgaaagcagctgcaatcgcgcttcccactactccaacagcagtgcagattccttctttcatgtcatatcctccttagtttcatttcgatcctgtcaagatcatcttctgcctgttttctttcttccgaaagatcggcagggaagaccgcgcccgcgatcctctcctgctcgatcaggacagcctgttttctgacgatgtctgccagcttttccgttacgccgcacatcatgtcgacgacttccagcaggcttccggttccgccttcatacggttccttcacttcgcccatgtctgcccctccttactgttcttcgctctctttgatcagatcttcgcatccactttcgatcaggatctgttcgaccttgtctttcagaaggcgcggcactcttttgtacagtgcaatcgcttcttcttttgtttccgcatacatgatcttctgcgcccataacatagccatcatcgttttgccctcctttccgaataaaattttgtatattgaatgcctaacaaaattaagcatatacaagctccgacatttccagcagacaggattccagcatttcattcttttcctgaagtttctgaatttcaacggtcatttctgcccgcgtcattcccccactttccggatccggttcatcatctttcatgtcttcgtcttttccagcctgatcagtcttcccgtactcccagtatttttcaaagtcatcttcgatctgttttgtcgtgatcgtgctgtccgccggaagttcaaacactacttcatcaaaacggtacatcttccgatcctttgcgtcttcctgacggtattccttgatattgtccgccatcctgacggtcattgcgccacccggaagattttccatcattaccttttccggcttctgatctgcatctacgttcaagtaaatcatgcaattcctccattcttttctgatattccagttgtccatagaatccatttacgcgatgtgccacctgaagcagttcttccgtgtggtatctttcttgtaaatggaatgaatcagattgttcaatatagctgttatacgatattatcttctgcgcccgttcacggcgcagtgttccatcacgcttcagctctctatatccacggatcagctgtcgtcttgcccttttgaatacgcgacgccggatcgtgatgtgtgttctgctgattctgtatcctgccatgtccagcattggtacgcccctttgccccggacgtggcaggttccgccttcgcttttcttcttcaatcggcaacagcttgacaattcctgtcgtttcttttatttgcaagtgctgattctttgtcatccacttgtccaatgctttcactgcccgctgttctccttttatggatccggatcctatcgaaaaatcatccataaatgttccgcagcgtataacatatggtatctttttccctcttcgcgtcgatcccagtgtatacagatagcggatcgcatacgacatcgtaaaattaaagagccatgcatcaagatacccgccgatgatcagatgtccgcccggtgcgacgctctttaaatatttcagcagtccgatcgcatatcttgctttcgggatttccatcatcaccagatctatacatacatcatattgaagtgaagcatatgcatgtacaacatctgtttttctcacatattctattcccagcgattccttcaggaaataacgcaacatctgatctttcagcattgtctgcccgtgtcccggaatgcttgcgtgttgcgtcggaagcaatcgcgcctgaatcaatggttctatcatcaatttcgtaatatgaccgatcagctgatgcataatgcacaacagtgcaatgtccctgatctttcctgtcattccatccggacgctgccggatcgtcactggttccatatcatccggttctattccgtgatcgaccagatcttccacaatcccaagcattgccaagccaatcgcttcagcagcttcatttttatacttccacgatccggataaatcatctatttttatatcgtcgcgtggaattcctgcatacttttcaataaacgtcagtacatcgtttcttctccattttcctttgaaacattcaacaactgcctgttcgcacagctgcctgcttaactttttatatctctttttatgtgccatcttatttttactttatgtgtgaagcgactttcggttgcgacagatccttgaatcaggattcgtcttgttactacttgccgcacgcataacccacggttatacattccagtttcccggcttccggttttactgattttcgcttatgcgcggatatacagacgcatttcagcaagttttcacctgccttcataaatacataaattcgcggacgactgttccagttcgagttacccggcgcattgttgccattctccgcagccagaccagcattcccgccattgttcaagttcgcaaaacgccacgggcagcgaaccccggcggagttggtaccgtagaaagccgatcccgcgcctgcataccctttttattttcttttcctgttaggtgtgtatgagtggtcttgcccctctggtctgcttacgcagaccattcaccccgctttttacccgcgccacaaagccgcggacgaccgctccaggccgagtaacccggcgccacgttgccattctccgcagccagaccagcagccccgccattgtacaaggccgcaaaacgccacgggcagcgaaccccggcggaggaggtaccgcagaaagccgacttaaaataagtcgttgaagatccgccgatcagcttcggaaacagcacacccaactttgacttgataaatgctttcacatagttccatccggacggcataccggaatatacaatgcctgtatcttcatagtccgctgtgattgatcctgacagtttctgactgtcgcggcactgatacacagtataatcaaatcctcctgcttcgtttgcagtcgtgtcatacagtggatccagtccgatcgtatatgatccatccaaaacttctacaccagcaacacgaagcggtgtctttcctgctgtcaggctgaatgtgcatccgtctttatgtcccggcaatgcttctgttgcgcccgaatgccacggcatagttgaaatacacgttgttgctgtcgttgtgatcgttccgctgatgtcaagattgatcgctgtgtattccgttccgtttactgttactttttcgattgaagatactttcaccagatccgcaaggttacgcatccatgcattccatctgtctttattcgactgtgcgcccatatcaccaaccgataccgtggatccgacaatgaatcctgctgcctgacttgcagacagaagaacccttttcacattttcttccggcaacgccgccatgtactgatagttgtaatttgtgcatccttcagcgatgtttgagttttccagatcaaaatgtcttaactgccacatacgaagaatccatcttgtatcgcagtcattccacagtccttcataaattgttttctgtcgtgccttctggatccctgccgttgctgatgcgaagttatatgccttgatccctgcgccggatgtcaatgcgcctttgctgtccagaccgccggggaatgttgcgtgccatgtgatcggtcgctttttatttttcggatccacatcccccgcatccggataatagccggatccccttgttgttctgaatgaaatataatcgtatgcaccgtcattccattctttaatccataatgcaagcgcaaatgtatatactggtgcatcttcgccagtaatgtcaaaaccgtcttcaccttcaaaatatgtgatgttcatggttccgtcttccagtgacagcgcgtttgctctgatataccatgtcatcggatcttcatccgcccagtcttcgaccgcttcagtattttctgtacacagctgtgctgccgctttatctgccagatcatccatcgctgtcatttttgttattcctgatactgacggatcatagcttcgcagtgtatacgtctttccattccatgcctgcgctgctgctgttgcaaaccttgaaagcaatttatatttgtctgtttcgcccgccgccagcgcacgcggataccatgaccagaaaacccgtgttgtatttgttccgtcaagtaattgtctgcacgcagcgtcaagtgcttccgccgaattctgtccgccgttcagtgcgattgcttccagtgccgccgccattctctcatgctgtgcataagacggaaatgataaatcaattccttccattcttcttttcctcctgtttactcattgatcagtgttaataccagatgtgggattccccgttctgtataaattgcgtatgcatatttaatatttgcatctttatccagcatatatgacgcttcattgatctgccccgctatttttacagcttcattcgccttgtccagaacttcttgcgcctgcttctgtctttcctgttctgctgtgacgcgatcgctttccgctgacactctgcctttttccgcgttcacacgacctgtttctgcctgcactctggcttcctctgcctttacgcgacctgtttctgcctgcactctgtcttcttctgcgtccacgcgacctgcttctgccttcgctctggcttcttctgcgttcacacgtttcgtttcctgatcagcatactgtttcattgtcttatcgaagatagaaagttcatcgcccgaaacgatcgcatcttcatcttttacctttgcttcaatctctatttcaaaagtgaccgatgttaccacctgcatcagatctgaagatttcacttctacttcacacaatgccgttcccgctgctgccagtgcctgactgtccaattccaccatcacaacattgtccgtgaattcacacggtgtatataccctgtgtctatctggttttctgatgaaagctgtgacgctggatcccgccgggatcgtgtatggttccccatgatccagtagtacggtttcgacatatcttgttgcccgatctccctgttttgcagacaccatatactgttttgtcccgcccgacatttcaatttcaattcgctgaattactttttcaagtgtcactgtcttccctcctttctataatccgagttttttcaggatctgctgcattgtcacttcggatccatctgattttatgaatttcaccccatgcctgaatatcgcatcaaacgtaaaatccactgcgttttccacggttgccttcgatccaaaagccacgccgcgcccaccatgcaaaaaatgcattgcatataccgctgttgatacgaagtcaatgacggtcactgtattgaatgtatctttcagcacataacgaacatcatatgaaaattctgtattcagatccccgccgcaaacagttgttgcttccccgatcggaagttcttttactgctgacgtatatacaccctgacttgaaagtttatactgtatctgaagtgttgctttattctttccgttgcatgttgaatatgtgctgtctgtcgtcgctaaaaaatatacgccttcattttccagtgttccatcctgtccacacctcatagaatccacctgaatcgtcggcgggttatattccacgactgtcacttttgcagttttttccgccgtccgtcctcttgtatcacggatcttcaccgtcacgtccatgatcccgtagtcttccaacgtatatgactgtggcaacgcagaaggtgttccataatatgtcctgtcattcagttccatattgactgatacaatatccgcaccgtatgactttgtgatattcgctgcggtaatggctatattgctgttatgttccacgaacatcccccacgccgtagggacacgcccttttgtatctgcgatggatatggaattgatcaccgggacacaatcatccgggactgtcgccctcaccgcagtatcccttgattgatatacctgtgatccaaacagcacttgaactgaaagtgtgcaggatcccgctgtactgttttttatctcttcattccagcttttcggtatggtgtagcttgtattgatctttgtcgcccctgacgtttttttgtccagcgtatacgactttgatccaatcgcccacttgaatctgtacgttgcatcagatgatagtttcacagaaaacagtgaatcttcatttgcattttctatattgataggaactgccgtctttccatcaatttcaaattccgaagcccccggattaaatccgtatggtgtaaatgatcccagatcgtaaaatgaaaaggtcatttctgttccttcttgtgtcggattctgaccgtatacaattttgaagaatggttttctgattgtcagctttgttccaatgttcagtgttgctttttttacccatgttccttgtgctacgatggtatttaatgtaaagtaggaatgcactgtccatctgtattgttttccatcaatgatcatgactgatggcatatcttctttttttacacccagtagccagtcatcttcgttttgcgtgaatgttactgatgtgattgttgttacatctccgctgacattcccggtgaagacagcctttgcatatgtacttgtgactggtacttctcttcttgtcgtactcatacttttactacctcgaatattccatcatcgtcgatcagctgtttgtattcctgtttctgttttttccttttgacgctctgtgttgccgtttcttccacctgctccgcttctctccatttcacacccattccgtactgtgtagatatgaaatcaaagtatccgccgtcgtctgctgctccaactgaccatcttcgcaccgcttcgacgttttcaatgtgcagcttattgtactgcacatatgccaccggaacgccttcctgtctgaattccagtcttttgtctgatagcaatgttgaaaacggcagtaccccgccatcttgcttttttccgatctccattccatcatccgtgtaatggaaatacgtttcattctctcttctgaattcttccagttcgtcgccctgcgatgtcacagtttcttcgaccgacttaatagacatatcaaatgaatttgcagtctgattcagtgctgttgaatattcatttgtcattctttcaatggtcttttcattcagctgcgaagcatagtctttcgcttcctgttctgctgcataggtcagatccctttgttctgttctgacctgttgaaccgatgtcatgatcccgctttctgaagatttaattgcagcctgtgcctgttcgattgtccagtatccttcattcagcgttttctttgtccttgcctgtgcctgatccactgcatcggacttcattttttcttctgtttcttcctgaagctgcgcaaaactctttgtcacattagaaagttcacaggtgtttttatccggatgctgcggatattccgtcatcttcacgatccgctgtttttcttttgtagcttccgtttttgaaattagatgcactgtatcaccgatgtcatattccaaaatgctgtattcctttttctgcgatgccagatccgcaacgtcagcagtatatgctgtatacggcttcgatgctgtgtccagcttcgcagtcgcgtcttcgatcagattttcagtgatagtgtatcgttcatctttccaatagcgcggaatcactttatctgaatactgatgattgtcaatatacggaacccccagcataatttccggtgtgatcccatcttttcccactggataaattcttgtgtagaaatcatatgtatctgatttcagtgtcaacttccgcaggtttaatccttctatgaaatacgctccgcgatccattccgatcgcttcatataggtctattttcttctggatactgtcgatcttgcattcgcatctgtatgtgtccataacctcctgaagtacatcccaagcattgcacgtttcatcaatgctgactgttcttcgctttgttactgtgcaatttccaactgtccaacccgttccatcaaaagcgaattccaagcaggcacgcgccgtctgtgttacgctctcaaatccatacagaaattcctgtgattccaattcttctatattcagctgcgctacataactgtttttattttctcctgtgcttatttccttcagaacatattcatcatcttttgtcctgatataatattcagcccgcagattttcaatttctgatcctgttttcggataactgaatgaaatctgcttatctccggatgataatgttttttcaattttcagatcatccggatcatctattcctgcaattctccggtgctgatcatcatatatttgaagcatatatcatccccctttataaccacatcggggaatacctaactatcacccttgcgccattcgttgaaaacgcaaggtcatttcttcccgtttgcagtttagggaacgcccacagatccacggatccgaaagcgttgcccccttcctttgttattttcccggtcttcccgttaatcacaatcgtttcgccattcatcaggctttcaatagtgtacggttccccgtttagtgttatcttatagtttgtcagatccgcttttgctgtcacttcaatgatgcaaggtgtgtccctgcttccctctgcatacagctttccttccagtttctgatcaaataacgcttccgcttcgtcgtcaaaaaagaatccatcaaattctaatgtcagaattcttttttccttttcaagcgttttttcgtaatcatcgccagtcagaaaccctttatattttcctttgaatcctctgatttcttccataatgcaggacgacctgaaattctgcataaaagatgacattgttctttccagtgtcgccctgttctttcccctgaagtatatggtcattgtcatagaacccagcggaatatctgtgtcgtactctgtcggaagaagtgcttttgacatcatttcatagtttgccgtcatcttcgggggctttgtttctgccgtcagcaatgtcgccccgtatcttctgacgtcaatcccgtttatgatcatgctttacctcctccgttttatttcatctgtgaatttttcttccacttttgaatatacttttgttgccacgacttcgccgtccattgttacatagacatataccgttgttcctgtcataattgcatccagctttttatccagcatgtcgcccagtctgtcatagaactgcttcaatggaaggatggcttctgctcccgcttctcctcctgccagcaatgtgtcgcctgctgccccgaatgcggtcggtttcgtcatgataccgccgttcttataccagctaatgctgaaatgtggaactgatggcggattcaaactgaatgatccgctgatagacggatgcggcagtttcaaatgcggtaacgaccagctgaagttgaattttgatcggatcgcactgatcgcatttcctaccgcagtttttgcagcattgatcggtgttgtgatcgctgtcttgattgcattccatgttgaagacgttgctgatttcacgctattccatacagaacttatcgttgacttaatcccgttaatcgcagatgtcactgctgactttgcggcattgatcggtgttgtcaccgcagtcttcactgcattccatgccgtcgatgttcctgttttgatcgcgttccagattgttgtcactgttgtctttactgcattgaatacagtctgcaccgtcgttttgatcgcatttacgacagtctgcactgccgttttgatcgcattccacactgttgtgatgactgtttttattccattcattacaggcgtgatcacgctgtctttcatgaaattccatgccgtctgtactgcggactttattgcatttatcactgtcgtgaatgttgttttgatggtattccataccgtcgtgatcgttgtgctgatcgcattcatcactggtgtgatcacattatccttcatgaaattccatgccgtctgtaccgcagactttattgcatttatcaccgttgtgaatgtcgtctgaatcgcattccataccgtcgtgatcgttgtgctgatcgcattcatcactggcgtgatgatattatctttcacaaaattgattgctgtctgtaccgcacttttgattgtttcccatacgcttatgatcgtatctcgacaattttcccagataaaccggaacggtacggttatcaattcaaatgcggctttgataacttccactatgaacatgatcgcaacctgaaccacattctttattgtttcccacacattagacacgacatcttttacagcattaaagattgtgctgattgtatcgtgtacggtcgtgcagaacgccgtcacgtttgtaacaattccattccacaccgttgtgcagaatgttgaaatcccattccagattccttcaaaaaacgaagatattccgttccagattccttcaaaaaaggttttcactccattccagacagtttcccagttagttccaaaccatccaagaaaaacatccgctacgcctttgactgctccgattattgttgaaaaatattctttcagaccatcccagacgcttgaaaaaattccttttacagcttcccacgcaccagaccagtcgccactgaatacagcagaaaatacatcccatattccaagaatgacattgaaagctgtttgtaatgcgattgcaatcgtattgaaagcagcttccaacactggtgcaagtaaattacagaatccgtcccagattgtttttattgctgacgtcacatcactgaatgtaattcccaacgctgacagtctttcactgattcctgctgcaaatgttgtgaatgcatctttgattttctgccagatcgccgtgatcgtatttctgaaatcctcattcgtattccataaatgaataatgactgctgtaattgctgcaatcactcccactacaatcgccgctggtgatgtaatcaatcccagtgctttcgtgaatactcctgaaaatccgcctgcttttacaagtccggctgacagcgttccaagtgcgcgtgatacatttgcgctgaacgtgatcactttccccaatcccatcagcatcggtgcaagtgctgccacaaacattccgatgcgaagaattgtttctttttgtccttcgtccattgcattcagtttgtccacaaagttctgaatatgtgtcacaatatcacggatttttggcatcagaatttccccgaagctgatagcaagttcctgaagctgtgacatcaggatcgtgatctgtccctgaagattgtcattcattgtgtttgccatcttttcagatgatccatcgcagttgtcgatcgctcctgccagcttctcaaaatctttatctgatccgtttatgatcgccagcattccggacattgcttcctttccgaataatgccgctgctgcctgtgcctgttccgcttctgacagtccacccagcttctgccgcagctgttccatcagttcacgcagcgaaagcatcttaccggaactatctgtcaatgatattccatacttatccatcgcagccgcgacagtatctgttggcttcgcaaggttcgtgatggctcctcgcaaagctgttcccgcctggctggacttgatacctgcatttgccatcaatccgatcgcaagcgcagcatcttctgctgtgtatcctaacgatccgagaaccggggctgcgtatttaaacgtttcacccatcattgacacgttggtatttgcattcgatgatgctgccgccaaaatatcagaaaaatgactggaatcttttgccgaaagtccgaaggcggtcagggcatctgttacgatgtcggatgtcgatgcaagatcttctcctgatgctgccgcaagattcatgatgccctccaagccgtccatcatgtcctgcgtcttccatccagccatcgccatgtactgcatcccctgtgcagcttctgatgcgctgaactttgtttttgcgcccatttcacgggcttttcctcgcagtttatcaagatccgttcctgttgctccggaaattgctgatactttcgacatttcactgtcaaaatccgctgtcgtcttaacagccgcaactccaagccctgcaataccggtcgataacggaagaagtttctgccccacactcgttaatgtgccgccaaccttttctgcttttgctgcatattcatcaaacggcgcacgcgcaagttctgcgttcacatttttcaattccgcttccatttcagtcagtgcagctttcgactgattcactgccgcttcctgcttcgtgatcgctgtttctgtttttgtgatctggctttcactggtggacagctgcgaagacaacttttcatattctgccttcagcttctgtgtttcttcgctgtcttcgcctgtcgctttcgcactatcttcatatgctttttttgccgcttcaacctttgtcttcagctgatcgtgcgctgttttttgcagttccaacttctgttttaagttgtcatactgttgtccattctgttgcacgatccccttttgaacatctatcttcgatgtcagttcggtcactcttgcacgcagggcgtcctgcgcggatccgcttaactttgcttgtgccgcagccagcgaatgctgtgctgtcaggtttttcatctctgctgctgcctgacgcatcgcctgctgatactgcgacgtttctgccctaatctcaattaaggtcttagccatgtttcgcgttcctttctttacttctcatcgaccgtcctaatctcgaatgccgcatgatctaaaaggctcatgatgtccgcttctatgcactgctgatatgagtttttcataagattgatacagatcttcactatccgatccacattttccctgcatatcttccacaggttttcacccggatcttcatcgttatatccattttcttcgtcatattcgtcgaaagcagatttttctttctgtatcttttcaggatgttctggattaagatccagaaatttcttcgtgatcacatcctgcatcatgaaatggatttctttcacagctgacaatacatcttccggatcggcttcttccacctcccgctgtcttgctccgaatactgtcattaagatcttcgtattcgcttcaaaagcatcactgatcgaatcactgtcattccgttccatgatttccgtatatctgcgatacatttccactgaaatcgtcgtgcagacatattctttgtgtccacacgacaagatcagttccggcatcacttgccatttgtaaaatttttcgcgaagtcttccgttcttttatcaaccttttcacccactgatacatccatcaatgcaaattccatcacgatcgaatccggtgtcattccggtttcagcatccagcatgtcatctgttgtgaactggtttccgtacatttcaacaataacgtccatcatatccatgaactgctgtcttgtgtacaacgcctgtttcgcttctgtgtccataatgctgtcgcgcacttccagatagcgcaaatatgccatcgtggacatcttctgcggcatcgtatattctttgttgccgatgataattgatcttttctttgttttagctgctgccatttcttttccctcctgttttatgctgcatccggtttttcctgaacttttgaaaaccagtctttgatcgctgccgctgcttctgtatgttccgcaagaagattgctttcatcaacgctgcattcatatcttccatccatctgacgggcataaaaatcgcccttcaatgttgctgtctgcgttgtttttgtttccccttctgtttcgtaattatcttcaaatccctgaccgaatcttccacagtacagccatttgaattcatacttgccattcagcttcttcgcacgccatccaagcgcaagttccggtgctttgtcatccttcgtcttaatcaggaagcctttttcatacagatgcccgaacacctgcgacttatcctgcggtgccaaactgttcacttccagttccacgcttgtccctttatatgacatgtttacatcttcaaccgaatcatcactgtaaattttttcagtttcaaattcatcgctgatctttcccgtgatcgcgcgtgccagctttgacggtgtttctgccgtgtattctgtttctgtattcgttgtaacttttgcgatatgaatatctctgaacgatacagtcctgcttcgcacgatcttttctttttctcctgccatgtttattcctccgtttcctctgcttctttcaaaatcaaaaatcgcatcgcattgataaagatccccgtatctgtttcagtctgatcatttccttcctgaaatagaaatccgtttttcttcatcagtctttttattcttttcacaagcgtctgctgatcgctccgcgaccagatattcacttgtatgcttgctgcttcaatttcacattcatcatctgaatgtgcatcttctgtgtctcgtagcttccacagtgtcacatgaagccgtttcaggctttcgtcataccatccttgctgtacgattgttccttcatccgaaatcggcttcaatgcttccgctgccaatccaataacatccactgttttatcctcccagtttttcgtttaatgctttctggtactcttgatcagctatcatgtgatattcactttcacactccgatttcgtattgttcaggaagtcccgcggcggcattttcgatgtcccccactccacaaacttcatgtaaaaccagttttgcgcgtcgccattcaattcccatccgacttcgccttttttggtcgttaccttcttaggaatgttgtcccgcgcatgtcccggcggtctgtatccattccgtcctgacttcgaattgtcagcagatcttgccatgtgtgccttcatcttcggttctgtaatatcggcggatctctgaaatatttttttattgatcgctccgatttcagcacttgacgacagggcttccacaccacgctgtacttcctcaaatccttcaaatcggaacgatatttccatctctatttcctcctgtcagtcgtgtctgttggctttcagttgcacatactgcctgtcattttgtttgaaatccgttgcataaatgtcatatctgtcgccttcaaattcgatcaagaaatcttttgcatgtactttaatctcttttatacgtctgcaatatctcacttcaaatacgattgcattttccagtctgacatccagtgcttcatataattcctgcccgtaaaggtttctgatctcacaccatgcttcataaaacagtgtcggttctttttcctgctgccgtccgttttccagacttttgtttcgcttataaaatttgatccttgctgttgccatgctatccccttaacgtttctttcagcatcattgactgaatcgcgtacctgatgcgttccgttgaatcagatgtgattttcccgttgttgtacattcgatccctgtgatcgtataattccttcacatacgaacagatcagtattttctgcctatttgttggcttttccggatcgagtgacggaatcagttccttcatttcgtcgatgacagcatcatgcattagttcgatcatgctgtcatcgtctgtataatcgacgcgcagatactgcttcaattcctttaggctcatatcatcacgcccctttttttgttagccagccacagcaacgctgatttctcctttaacaaccgcagtttcatcaacagactgaacgtcaaatctgtcacgaaccttgattcccgtcagatccttcgcccacagatctcccgcttcagtagaaagttcaatcgtcattttctcgcggtcaaacagggtaacagcttccttcagatctcccatgtataccggatatttgtaaccagtcacatcgtttttgtcagctcctgctccgccttttaatacatttgtgcttttcagtgtcttattgctcacaacctttaccggatacttgccaaaaagaagtgtctttgttgcatctgtcggatccggctgcatgatgtacttgccatccttatccttcagcttgtccatgtagttaaagccatcctgattcgtcagtacaatagaacttactgcaatcgccggatccagcttcacgttgaatacatctttgaaatcatcaaaagtcgcaaccgcaacttctttttcttttgtgattgtgttaatcacattcagaattgcggcatttcttgtcgctcttgacttctttgcgatccatttattcaggtatgcaaggatattcacagcagtatcctgaagcagttcgcgtgttgtcttcaaaattccgccctttttcttgattgcatacttgatctgtttcaggttcggtgtttcttcctcttcaaattctccgccttcatccacatcgccccaaggtgtactgtctgcatcaacctcgatcacacgggatccactcattgttgctactttttcaacattgacgtactgttccagatcgttttctgttcggcgcagttcaatgatgtctgtgcttacatcctctggaaccgtaaaccctccatcctcgtcttcaccttccttcatcatgtttttaaagctgtccatgatctcctgatcttcttccggcatagcacgtttacgaaggccacatacgatcctgtttacaaacgctttgcacacctgcgctttgctgtactttttagacttctgaccatcttcaacttccttcactttcccattgtgtaaagaatccttgattccatcgtcatcgtcttcttccatttccatcagcatgtcgaattcttcctgcatctcacgaagttccgtcatccgatccttcatttcctgtgtttttccctgtccctgaagacctctgatcgcatttttcttgtcattgatcttcttcagcaatgcccttgcttctttgctcattttgttttcctccttagattccgaaaagttccatttcttcgatgatcgcttcttcttcggctgtaatcttcgccgtcacatcatctgcgctttgtgttttaatgccttccggtgcttttttaaaattctccatcatccagccaacacaggcggcgaccgctggacgttcttcgatctgcacatcgaagatttcctttgcttcctctgccgtcatccatgtttcagcattgatcagatctgtgacccgttcttctgtcacaccttctttcacccgtcccatatatatgtccgtgatgcttttctgacatttatccagttcactgatcagtcgctgaaaatcatccgcatttccatacgcccatgacaacggtttgtgaatcatgatctgcgctcccgatgacattacaatcgaatcacaagccatcaggatcacggatgcgatcgacgcagccattccgtccacgatgcctgttttatgtccggtatgccgtgataaaatgctgtgaatcgctatcccggcaaatacatcaccgccgccgctgttgatgtacaccgtcagttctgcccccggttcaatctgattcataaagtctgatatgtcctgcgggcatgtatcttcatcgcaccatgcttcccatgtcgaagaaacaatgtcgccgtatatatacagatccgctgcattattcgatacatttctgaattccataaacccagtattttcaatcttctttgtttttggatttctccgtgaaaaattgaatttattcttcatcgttttcccctccttcctgcgattctttttcatcaggttctgttccggtcgtgtctgcccgatctccttcttccggatccttctgcgttttctgatccgtttccggctgtataggaagcacgctttgctgctgtgcatttcctgctttttcgtactgctttccaacttctgtgatcggaatataatttccgttcacgatcagctgatcgccgccttctgcatccatcagatccagttttcgtcggcattcattcactttttgaattccgttctggacacctgttgcgaaaatctccatctgtgtcttgctgtcagttcttagtaaaactttttcgttcagtttgtaatattttccttcactgaaggcttcttcatctgtcaataacttataattaacttcttcttcgtactgctttaacacaaaaagcatcgtatctgtcaggaatgacaactgctgcatttcgctgttgctgtacgaagattttgtataatcattgatctgattcggcttgattccgaatgcagctgcaatctgaagtgctgaatatttctttaattcgataaactggctgtccgaaagtttaatatccagcggcgtcagcttcatcccaagtggaaccggaatgatttttccggcattttttgcacctgatccgaattcttcaaatgcctgcaccagtttttctttcaaatctttgttcagatctcctgtgtattccagcgttgctttcccagtcagtccgctttcatataaactgttcagatagtcctgtgatgccgctgcgccctccacagttgtcttcaatattgcctgcacaggaagccccgtaataccatccaagctgtgtgatgtcttgaaatgcaggacttcatctgtcccgaacacatattgctgtccgctgtatttatcgttgtagacgtaccagatctttccccttcctccgaagtatccttcatcatccactacgatctgcacgcagttcgacggcatgatccacaagtccatgactttgtattctccgccgtatttttttcttttgaacttcgacctgacatatacatacgcatttccgaagtggtttcggttcatctccacagcattccagaaagctgtgggcgtcataaatggattcggtctgtttttcagcagtttcgcaacatccgacagttctggttcaatgatccctttgtctgttttttgataatatttccacggtatttttgccagcgtttcagacatcattttcaagcatgtgaagtacgttacttccgccatcacatccttgttttttcttttcacatcaagccattcaagaaatgattcttccttcatcgctggcgatgtttccacggtgaagttcattttttttgcaatccatcctttgaacttctgccatacattcaacctgcatcaccccctcgcctgttttttcttgcttgcttcatatagtttcagccattcttcgaccgattctgctgtattctgtttcacttcgcctttcattgcggctgtccatgcgtcaataatcgcatctatcacgtcgattctttctgtctgatactctttgtcgatcttgatttctccaaaactgttggaagttgtctttgcattcgcgatcgaccatttgatcatcgcgtttccatcgtgttccacatttccggattcaatttcaagtttgaaatcaaccgttgcatcattcagtgcctttgctgactgtgttacagccacgctgtcgaatcccaatgcttccagatcagtcaggaaagctgacgcattatgcggatcgtaaagaataaattgcacatccagttcataatcggtgatgattttttccaagtaggttaaaatataccgatagtcagtttttaccccgcccatcgtttctgttaccgtcacaagtccgtcgcggatccataagtcatattccgtccggtctgttttgatatgttcttcaacccttcttttcggtatgaaactgtgtgcatgaacaaaatattttctgacatcatctttcaagaacggaaaaacgatcgccagtgatgtcaaatctccaccagcagaaagatccagtcccacatagcacttctgtccccgaaaatcttctagtgtcttctttgttgcgccattttgccacaattccatgtctttcaaatagacatcattcgtccattgaatccacatgttcagctgtttcacaatgaaatcgcgcaaactggatccgcccatttctttcgctgtttcagcaatcggaaccatgttttcaagtgcttccggatcatattgcaggattggattcgccttgatccaattcttcggtgtccacatgtcgtctgtttcatccatttgtgcgatgtatatgaactgtgaatcattgtgtgcaatgcctttcagcaccttcacgcaatattcatacaatgcataacatggtgacttcagatcgaaccctgctgtcgtgatcacactgatcagcgcagatttcatcttcttgattccgccttccagaagtttgtacatctggtcgtttttgtgtgcatggtattcatcaacaattccaagatacgggcggaatccgtcgatcgacttcgtatctcctgaaagtgcctttattttgctatgtgtcagcaaacaatctattgtgctgttgtgttcgtgtatgttgaagcattcatccagatcaggatctgaccggataaacttcacaatttcattgaatacaatcagcgactgatcttttttcgttgctgtgcagtatatctgaccatatttgtacttctcaaaatttccgtaatatgccgccagaattccattcagaaaagatttaccgttctgtcttccaagttgcacatatgatgttcggaatcttctgtgtccgcctgtttttgtccgccatccattcagatttccaagaataaaacactggaatgcgtaacattcgacctgttcttcctcttcaccttctgcaatggttaatgtttcagcgaattcaatgattctttccgcctgctccacatcaaaataatatttatatggcgcagcctttgacttttcgatgtcatccagatgacgcttgcaggcaagttttaccagattcccggcaattatttttcccgcaaggacatccgcagcgtactgtgttgttctgtcctgcatcgcatcatcacgcaaacttgtctttaaatttgtttgtcttcggtgtttccggtgcttttggaataatcagtcggcatcttgacgatactgtcagtccaaaatctgctgcaccctgtcggcactgtttgaaatacctgtcctgaatgatcgccagacgttccacctgactgttcacaacctcatgttccgccatgatcggattgccttctgcatcttttttccctgtgtcgtatgccacagttaccatcagcggctgctttgcgatcgtttctgtcacttctctgtatttctcctgcgcgatcactaaccgcgccagtgcttccacgtccaagtttgaaatcaggtcgatcgcccgcagttctttcaccgtttttctgaatgcctttttctgcgtagctgtcaggtatgacggcggcgtcactctgtctgacggtgcttgcacttccgtccgttctctttctgcgatctctgcctttgtcagatgtttctttccttttgcttgtaccagcgcgatcggctgtcgttgtcctgccattatatcgacctcctttcccgctgcttctccttgcggattgtgtcagaatctgacacatgaccgtttgcccttatatctgaaatttccgtggggagttttctccacagaatagagggggcgcgactaatccagcccggtcaaaactttttcgataccccctacccctttccagtgctgctggataatgttccgcagcaactcctgtgtctgtcttttcgttgcttcatccttcttgtacagcgcactgatgatcccgtggtttccattgcttaacgggaataggttttccacgttcaagcgttgtgtccagtcttcttctatctccgtgatgtggtgtaccatgtcagccacaacaatcttgtgttgaacatagtacgcatacatgtccaagctgtcatataaagacagtgcaaacgcccgtactttgcgccattccgccgacacatagaaagccgctgctttcttatttcttcggcgcagattgtattccatatgccttgacatcttgtcgctttcctttgcttcacagtccggacacaggcgtaattcctgcggtatcaatgccccgcatttacatctgtgtaatagcactatgtatcaccttctttcgtgctatatacacactgcacgcaggcatctttgcagatgcccgtcgcagtgttcagaagggtgtggaaatggcaataaaaaagcgactgcacatttctgtacaatcgcttcttgcaactttccacgctatcagtttacatctttcatcccaccattaaaaccccagcttttccccaacttttccccaaaaagaaaagcaaaaaggatttctttttaacatttttcaacgccatctatcccgaataacttcactgacattttcctgatcaattcttttgaccatctggacggcgtgttctttccgcagttctggatgtctgcaatctcttcatacgatgccccatcaatataatgcatcttaaaggcatcgtatttgtatgtcatttctttcgtttcatattctgcccgcagttcttccattgctctgtcaatattcgcaatcatcatcgctgtcttcatttttgatctgcgaacacttccaagatgtgcgccttctcctctgaatatatcatactgttcttccttcagttcttcttcctctgatactgcgctttcaatatgtcttttcatttcgatgtattcttccatcagcatccgtgtgttgtgtagtacctgctgcctgcggatctgtctttccgcttccagtgctgtctgcaccaccttcttcacgaaggtttcttcattcttttccttttcctgctccatatttgccacaccatccttcctttattatccttttgtcgtcttctttttcggcggtctatactgctgccgttttggtcgttttaccatcggaattcctcgccttctgcgctcattgtttgacatccggtttttctcctcataataccgccgccatagctctctttttctgatctgtgtttctgtcatcgtattattttcatgtatacgcctgaaaatctctgatattttatcagctacctgccgtatattctccatcatttccgtaaatgccatattcagcttcacagctgcatcactgatcattttcagtgtttctgctgccttatccggcgacagtttccattccgcttccgtttttctgatcactttttccacttcctccggttcaacctgcattttagccgcaatataaaattttctgtcttcatatgccggaagatcttcgatttttctgatttctgcatcttctgttttctttttttcttccggtagcggaatatcatttacgggaattaccatctccggcttctggtctttttcttcgacctgaattccgccttttttgtatttcttcattccaatcttcatttttgtttcttcaatcgcctgtcctacttttttaaatgcttctttcagccccatatcgtcacatccttccttttcgcctaattgaaaggcaattcttcgtcgatgccttccggtatattcataaatccatcgttttccgtctgatccggtttttgatgtcctcctgctccgctggatccctctgctgccgctttgctttctgcgaattcaatgtcttccgtgatcacttccgtcgtgtacactttgatattgtctttatttgtgtagcttcccgtctggatccgcccagtcaatacaatctttgttccttgatgcacatacttttccacaaattccgcactttttccaaaagcaacgcaagaaggaaagtcagcatcctgctggccttcctgttttcttcctcttctatcgaccgcaagtgtaaaccttgcaatcgccattgaatcctgcccctgtgtgtatctcacctgtggatcccgtgttaaacgtcccatcaaaatcactttgttcatgcttttcttcctcctgctttatgtatcccactggaattagtattctttcttctcctttgtcttcaatgtcgtacatttcccctgtcgcaagtataatctgtgtttttctcattcttgcctttctaacagcctttctgtcatctgttcatatagcttcttgaatatatctctttcagtccttgtcttaatcagttcttcattcatttccgtctggactttcgcttccgtttttttctcctctgcttttttctcttctttctgatcagtgacaactgttttgtcctttgtcgcccccccgcatcgtctaaaccgatcgagatcatcagccctatgtcgatgttctgcatttcctgcgctgtacatactccgatgtattttccaatgcgttccacggcgactgtgtggatctgttcacacaaaacagtgctgacgcgccctgttgatcggatcgtgcaatgtgtcggaagttcattcttcggctgtgttgtcaaatatacaacttccagtgtctgactgtttttattgtttttatcattgctgacaattacgcccggtctgtctgcctgctgttcgctccctgtgttatatcctccccggcttatataatagatttctcctctttttacatcatctttcggaagtgttgttatctgcatctttcctttctcctttcctgtccatatctttaatgccctgaccgattgcctttgcaacaattacgatcagtcccgcaaaaatcactgctgccagtatcatcacaagccagatcagcaacgatcctgttgcatttatcattctttcaatgttcatctgcatcatgatccgatttcctccttgtattgttccttcagcataatcattctttcttcctgctgcttcttgatcttttcattctttgtgaccagacgctggatcgtctgcgcccgacttcggatctgtctatgcagtttgatctgtcgttccacctgctgccgcttctgaatcaagaactgcatttcatgatctacaatcagcactgtgtatttcttcccgcattcctgacaggcaaaatactgttctgtcacgttgaagccttccgcctgccttgcaataactctcgttttcacatttatgtgttcaattacggatccgcagacatcgcagacaacttctgatccgtttctgtacgcttcttcattgaatttcttttccatgtcgttctcctttcctatgtcgcaggcatcaggacatcttgactgttttcctgatctggctgcgcgtgtgcgggcatcaccccgcacatatgcgccatcattgcagcgatcgctgtgtcaaattccggttccagcttttcatactgatcatccggcatcgtttcccatagctttgtctgaatttctctgataccgatcatggcattcatcaatctatcctgtgtcaacagcttcttcgcgctgtatttctttaattccggttttataaatttatctttatctgccatcagtcttcatcctccaagtcaatcagtcccaatgcttccgcatcgtagacatccataatcccgatgacagcatatccttcaatgatcgcgctggatgtctgtgcatcgtcggcgcatgtgatgcacacacgcatctgttcacctgttgatcttccatcacggaatgcaagcagtgtcaaaatgtccttttctttgtatcctgcctgatcctctttcacaatcatgtggcggatctttccttctttgatgtcttttaataattccgctgacactcgcatcatccgcgctttcttttcatccgaaggtaggttctgcatcttttcttcctgctccatttcagtcagctttttcgccgtttccctgtcgattgccgcctgttcctcgtcatatcgctgttccggcgtcttttcagcttcttccttatcaacataacgatcacagtcctgacatgtccctgttttcacgttgcattctgaatatcgctggcatgaatagcaaagtgatgtaatgctttccggatgtgcctgctgccattcttcttcctgctcctctgccgtttcctcctgctcccattcctccggatcttccggcaaattcatctgtcccggaatctctgctttttctgctgcttcttcgatctctttctttgcctgcttcacttcttttaatgacagcccgccttctttgtacttttccagcagttccatctgcttatcctctgccattccgctaatttcataggctgctgaaaaagtcaggcgaccttctttcagttctgccgagaattccggaatcaaatgcttgttaatactttcaatctgtgcaatctttgttccggtcgtattcatgatcgaagcgatcacatcacgcaggcgtccgctgtccagtttgtacccctgaagcgtcaatccattatccttcatgtactgaagcgattccttcaggcgtttttcctcttccagcatgtcagcgatcgttttatcgcgatacgcatttgcaatgatcagctgcaccatctcttcgttctcttcggctgcgcttttgatctgacatgtcaccgtttcaaaatcttcatatcccttttccagcaacaaattcaatgcacgccatcttctttccccggcgatgatcttatattctccgcgttcacacggcgcatatgctactgtcatattctccatcagaccaaccgccaagatctcctgtgccagctgttcaattcccggcatcgaataaaaattcctgtcattgctgtaaatcttccggatgctaatgtcccgtgtccggaatcttgctttcggtttctcttctgctgctgccttgctgtttttatttaaggcatccattacgctccatcctgctgccatgtttattcctcctctgctttcatcgtgatcgttatctgttccagcaccttccggcttgcgttcttcacatccgcatgtgaatcacttctatctttttctatgtacttctgaatcaaacgctttgtcttctccggatccagaatgatcctaaacttcgcaatcgcttcatcgaaccttttctgtatctgtctatccgtcatattgctatcatcaatttcacgaaagatcggttctgcttctgtttcgtcgatctgatcaataatgtccgtgatctcctcttgcagatcctgcattctctttttcagttcgtccgcctgctttgctctgtcctgaagctggttaaatgtcttcaggctgatcgttacctgtccatcaatgtccatgcctatccctccatatctttcagcagttccgtcacaacgtttcgatagtcctgtgtgacaatacaatttttagaaaacttcggaagcggcacacgttgcattgtcgctttttctgcaatgatagatcttctaacagctgtcacgaagcaatcctgtccagatgattctttcagccacgcttccacctgaaggcttgtctggttcttctgtcgcatggtcattaaaatcttcatgcggatccggtcgttcaggcttcgcagatcttccagctgttcatccatattcgcaatcgcttcaatttcaaatccgccgatcttaaccggaaggatcacaagatccgtcgccaccaaaacattcgtcacggtcatatccagcagcaagccacaatcaaccacacaataatcatatacatcctgcacttccagcattgcagccgcaaaacgaaggatctgatcttctttttcgttcagcaacaggttcatgttcgtccgcattaaatatccatttgctgtgatgatgtcaatattatgatacggtgttgtctggatcagatctgttgtcttgtaagatcccccgacgcttctgtgtctttccagtaattcggacatcccgatcccttccggtttgtatctgtcatacaacattgatacattaccctgctgatccgcatcaaccagcagcaccttctttccctgttcttctcccagcaggtaggcgatcgaagccgccgtcattgttttaccgatcccgcccttctggttcataattgcgattgttttcatgatgtgtacctcctatttcacaattttgaattttttcctgtttctttttgcctgttcctccgtgatgatatattcatcgcattcctgtttccatttatccggattcttcgtatctccgtcataccatctgcaccactcgcaggcatcacaaaatatctttgcttcccctgccgtttcatcttcgctgtataaattgttcgcgcagtgattgcagatgcaaccgccgcaaggaaaagcataatcacttcgcttcatagtattcgttatactggcaacgcttgcacttccgatccagcattccgtcatccggatttctgcatccagtacattctccgcggctgctgatcactgcttccttgaatccgaattttttctgtctttgtgccagttcgcagttcttcagtgctttccttgcctgtttggatctttcttctactctttgaaaataatacatttcactttcccgttctttctgatcatcaggttctgttctgacattgcatcttctctgtttccagtatcaattttctttaggttgatatattcttgtagcacccggatcgcttcttctgccccatagcaaactgtgcagtaatgtcctgctgccgccagtgccttcagcatcttcttctggctgtcttccagtcttccggtatcgtatttcatttcaatatacaaaccgctgtacactcccatcggaaccggaaggcacagatccggaattccagctttcacacccatctgcttcaatttcaccgcttccgctttgttgcggctccccccattcgggcaatgatgcagcagttccagttccggatgcgcgttctggttccatcgcgcccagtccatgacgctcatttgctctgtatcctcgcttcttcttgcgtatcttcgattcactcttcttcctccttgcatatgttccaatatttgcagaacaggtagcagtgatgacattgccggatcctgatcatacggatcatgtgccggatcttcttttcgatgctcctgatcatccgcgtccctcctctactttctttttctcttccttcagctgttgcgctcgatccataatcttcgtgttgtatgtatacttcacaacgccctgatcccacagattcgcttttgcgccctgcttcccgtagttataaactgccagcgtatagtacggaagatcttcatctggtactgttccgcgaagatcattctggatttctgacagataattcacaccaaccagcacattctgatatggattcttcaagtcatacgctcccagttcttccatcctttgcatatgccatttttccgacacctgcatcaaaccgattgacgttccattgtcgccttcagcgtcccatctgcatctggattcctgttcgatcaatgcaaaaaccatttcataatcgacgtcattctcttcgcatacaatgtatgtgtatacctgaatgatcgtcggcaactctccacctgctgccttgcattcttcagatatttcatgataataaaatcctgtcacttgatcgctcccccagtcctgcgacattgtattccacggaaaatcatatgtaccgtacagacttttgcacccatatacatccgtcatgtctgtctgctccactggatcctgccgatcatacaattcttcgatctgctcctgctgctgccggatctcccaatcccacgcctgcacctgcttttcaaattcgtgcatttgtattgtcaacaccaacagaaaaatgatcagcggcatcgcaagcattgccggatgtcttgcaatgaaatcccatacagcacatatgatcttcaaagtcttcctgatcagtcttttgatcttccttcgtgccgttcttttacttcttgcccttgtcatgtgccgttcctttcctcaaccgcatccgcccgtatatgtagaacctgccgttgaacgtgttatatttcacttctgcttcagcaaaatcatatttatcgccataccatttcatcaaatgatcgcagacgttcagatctccttttacgatcctgtccacatccttctgttttgttttgtaatgattgactttttctttcggtttccgcagtccctttgatgcacaccatgtcttttgatacttgcctttcttgcttttctctttcgtgatgtaccttgccattccgaccagaccgttttcatccctctgaagccttctgatttcatttctttttccaagattccagaccgcttcaaccgtgtccatatccacatcgccatccataacgatgtgatggtgccagcgtcctttttcactgcattctgtgacgtatacatatcttgcgttactcaatccctgcttctttcgctgataattcagtcgtctgatatagttctgcatgttcttcgtcgccacttccatcgaagcaggcatattgtcatccgtgtatgtgaatgtcgcccatatatctctatctgtgaagttctcaccgatcaccctttcgcacatctttttactgtttttatcattcagattcttctgtgcttgtctttgtctttttctcttcccttcatccgggatctgatctttctgtcccttcgtaaactctggatagatttccacttccagctgatcacctgatcggatctccttcgttgcatagatgcttttcaccttgccttccttcaggatcctttcttcgtttgcttcctccatcttatccagactattcatgtatgctgcttcatagtcataaggggcatatacagccttccttcttttctttctcattccctttacttcctttagttgaattgttagtatccattacaaggtcgttttaggaagtccagaaaagcgcggattcattgacttttcaggctgtccggtgtacaatatctttgatgtgtactatggttttcgggcatcgtcctgaagccactgtgaagccttctggtgccgccaagcataccagagggcttttatattaccctgcttttctaacgtcctgcatcgccttcctgacgttcactgtcatccttcttcgttttctcctctcccagaattatctttcggaagatactttcaaatatcggaactgctatgctattccccgcctgtttatacagtgtcatgtaatatcttccttttctctcatgtacagctttcgctgcttcaaattcttcgtctgtatatcccatcagccgccagcattcccgttctgtcaaatatcggtatcgtcctgatccgcaatcaatcacctgtgcaggcgttctgtcctgtcgtgttgtaatcgtgtaggcaaaatctttgatcactgtcgccctttttatccctgacgcgccgatcacgttatatacagatggctgtgtgacgttatatacttccggaacatttttgttatcttccaaaaattcgctaattttacgcataggcgtcctgatcaggcttgtgaaatcaaatttttcaccatttaggcaactgatcgtgaacactctttcgcgtgcttgtggcagtccgaattctcttgcatctaaaacatcgtaattatttgtatagcccattcgttccatctctttttgataacgtacaaaattcgcgatcatatgtttcgatgtcacatttttcacattttcccagatcacatatttcggtttccattctcccatctgatcaatgatgtgaatcgtttcccacatcaaactcgatcttgtttcacttccttcgtccgcccctctttgatgtccggctatgctgaaatcttgacacggacttccatgtatcaaaatgtccggcttcagattccatcccacaacagactgtgttttgtatggcagttcttcactgaacatgttgttataagatcggactgctttttcatcaatttcaacgtagtcgatcgcttttgttggtatcttcagatttcgcaatgcacatcgcgggcttcctattcctccgaatagttccaaaatctgcactggtctttcttctgttgctgtcatctgttcattttcctttctatgtaccgccttccggcataatcaatctgcgctgatcagcgcagtcatatatatcaccacatcccttccggcaacatctgacgctgcgttgatgcttttcacattaaaaagcatctgaaaacctgttgaacatctgcatagaattctggcagtctatgcccgccgctatttttccacagtgttcatcggacggctatcagcttgccatcgtcagcgatcacgttgccatcgtgaccggacggggctttcaccccgtttcggcttctatcttctgaactattcttcccattgataagatgtacaagctatgcatcttttgcatctttccatcggttcgtctgacaccacgcttgcaaatcccatgcatgtcccgtcgctatcccttcctgcattcccaatcttacgttgaatactacatgtccggatccgttcttttatcctgcacttcttgcaaacgattttctttccaaccgttccccctcttctcctcgtatattctgctgcccatgctctgctaactcctacatcattagatttccagcccatgatccactcgccgcatacatcgcaatatacgtccgtttctactgttctttcgattgccattttcatgtcctttgcttaatagtcgtaatcaatattttcatctgcttctgtgtaatattctccgtcatagcctttcgccattagctgatcgtagcagtcccagcaaaccagtctgaacgtgatcccgttgcagtcccgtgtgaactgcatgtcacttcgttgcacctgatgtccgcacacgggacatgtccggatgtcagtcgatcttttctttgtcactgttgttcctcctctctgttctctttcatcagccagatagtttcatcatcgttgcaaactccgaagtattcatctgtccgtgtaaagttgaattcaattccataaaattgtctgattgctaacttgaaaacttcccatctatcctgacagcttttgcaggtacgatcccagtatccgaagcccagtccgtgatccggatcaccaattcccggcgtcgcttttcttctttcttccagtgcctgatcccacgccttgatcgtttcttccagttctccgcccatttctgtcatcataaattttttaatattcagcttcatattcttccgcctttcatatgtacttccccgatccttttcggggaataaattatattgccttctgtgccatgtctgcgctgtactgcttccggtttccgttttctgcgccacctcttttcagttcgtggtagatggtggctctgtgaacgtccatcgcttccgcgatctcttctgcacgcttcccctgcttgcacatcgcttcaatggctttccggtcttcataattcaatcttttatatttccttgccacgttctcattctcctttcctttgtaaataaaaaatgcggtaagagtttttacgctctaccgcattctgcttttttgtgtaaaaaaataaatgcggcagaggtttaatacctcttgtcgcatttaattttaaaacttataatctcatcttctgtcattcatttatatttccacactttccgaaatgaatttttcaaattcttttctctttacaagttttttcgtacctacgtaaagcacaaacggacatctcggttctttcaaaagactacttattctattttgtccgatattactgtattctgctgcctcttcaattgtaagagccactttttcacatattgcaacatattgtttgttcataaaatcctttccttattgtttaacgtgcgtagcattcacttctatccgcaatacacacgatcattctttgtattcaacaacgttttcgctttctccattttcatacttgcaattgcttctcgtttacttgtgcctccaacatacattggtgtacacatttctaaaatacggtcatagatacgtcttttctctaacatggtctcgctttttatttctttcagcggaagattggtcgtgatgatcaatggtcgtcctgaacggatcctgcgatctatgacgctaaaaataattcctaacgcatattctgaatttcgttccactccaagatcatcaataatcaaaagctggtaagaagccaatgcattgatatattccattttgtctgccagtggaaatatatcatcgataatggtattgaaatttgtcatctttaccgttacttctcgtttgagaagatcattggcaatacacccggcaatataacttttcccggtaccaaccggtccccaaaacaaacaaccaatatgatttcttttcatttcatcccagttatcaacatagcttttggccttatgcattaccgcatctgacatatctgcattttcaaatgtccactcttccattctgctctcgtcaaaacagatgctcgtatttctgctgactaattcccggtgctctttgtctttaaaatatttttgttcttcttcatatgcttttctgtcacaggcacattgcctggaatgttttttcatccccataaaactacccttagggaaaaaagcttctttcgcttccccacagactttgcaatatcgcaaaccatcactgcctacacatacgggatcttcttctctcatcacaaactctctccctccccatagcaataatttacttcatgatatttattacttttatatttctcagttactttactaggtgccacatttccggcttctgcacagccatttttatgaccagatgatgggtgcttttccggctctattacagccatcttttcaaccgccttatcatcaaccggctgtaaacctatctcatcagatggaattttcacatataaatgattaggttttgaaaatccaccggatctgcgaaccaatagtcccacatcatctaattccttcaacgctgtttttacagaagatttgcatttatcgatttgaacagacaattcttctattggaaatatcaaataaacatttccatacttgtctatccagctattctttctcgatatccgcgcccggtcatacaaaatcatataaagaaattttgcattttgagaaatgcgcagtttcagcaaaaacttcggaaactggaagtactgaagcatctgctcagactccttcatgtattcatatttcattcttttctcgcctcgtttctgtttctaattgttgtaaaaatcatttttatgccggctaaaaaatgttcttacacatatacaaaagatgaagggcataaatacagcctcttaatgaaaaatttttatttttcctgcaaaaaataccctttcattaatacgaaatgctgagagacatttttacagccccctgaggaaatttttttatttttttcggttaatcgaatacttttaaaaaaaacactcacctattcacaggtgaatgccttatcaaaatttccttattttgttgtctgtgacgcttgctcagaaacgcttgcgtatctgctaaaatgtaattgcctgcaattatattttcacgtgggtatggggacgtaatccccatcaagtccgctactcgtaagtaatacaaaattgtcaaaatgacaatactgtaatacacgggtggatcttgctctggttgtaacacatgaattcatacaataataggcccaaatgggcactttcaccattcgagcctatatattatatgtctttgggataatagcttaaaaagtaactgtctagaccactttttaaactgtccactatctagggtacagtttattttcaaccatactattttttattctttggctttattccccagaataccacattcatgagtattacgatcaacagcacaacagccattgatacccagaatcccatattgagtccgagccattcacaagttccaaaaagtgtcatccataattctttccaattcattctttctacctcctagagcagttcgccataatagcggacatatgcttttttcaagcttgttgccagcatcatgtacagcagaatacatgggatcagatatgcaaaatatgatgccggtaaagcaacaagaccaagtgcagctccaaatggtgtgaacggaatcacagtcagaactgcaatacctgtcatggtaagcaatgttaccggtgctgatgcacggctctggataaacggaagctttggtgtgcgaatcatgtgaatgactaatgtctggctccacatagattccacaaaccatccagcctggaacattccgatataacgtgcctgcatagtagcaagctctacaccgctgtaatgggctgccagatcattgaataaaatgccttttgatacaaataacgggcagaatacaaagtacatgaatatataagttgtaaaatcaaaaatcgaacttgtaggtccaatccagatcataaagctacccacactggaagcatcccatttacgtggttttgcaataaactcttcgtctacgttatcccatggaattgctgtacaggacagatcatagatcagattcaggaaaatcagatgtacactcatcatcgggaggaaaggtaacagtgccgaagcagctaatacagagaacatatttccaaagttagatgaggccgtcatcttgatatatttgatcatattagcataagttttacgtccttctatgattccttcttccagaaccatcagatctttttccagcaggatgatatctgcggattcttttgccacatctactgcagtatctacagagattccaatatcggcagctttcattgcagcggcatcgttgattccatcacccatgaatcctacggtatgaccgttttctctgagaactgaaaccacgcgtgctttctgatccggtgtaagctttgcaaatacctctgttgtctctactgcttttgcaagctggccatctgtcatatgatccagatcagaacccagaagcatgttgcgtacttcaagtcctacctgcttgcagattgtacgtgttaccttatcattatcacctgtcaaaatctttgttattacgccgtgtgctttcaatgcccgaattgcatctgcagtagactcctttggtggatcaagaaatgccagatatccaattagtaccatctcacactcatcttttataccaaatgcacccaccggagaaggattgcttttttgtgcaatggcaagcacacggaatcctttgtcattcagttcgtctactgttttcagaatacgcccacgaacctcttctgtaagtggctgcacagtaccatcgcactcagcaaaagaacagatggagagcatttcttctacagctccctttgttaccatctgtgtctttccctttttatcctgtactaccgtagtcagacgacgacgtgtaaaatcaaatggaatctcatctaccttcacataattttcagacaaatcgaggagctttggatctgccgcctcttcttcctctgttctgtgaatgatcgccagatccatcaggttcttataaccggtctggaagtagctgtttaagtatgcatggcgcagtactcttgtatcatcttctccattcacattcaggtgatattccaacacaaccttatcctgtgtcagtgttcctgttttatctgtacagagaatgtcaatggcaccgaaattctggatagaattcagattcttaacaatcgtctgctttttactcatggaaacggcaccttttgcaagacaggttgttacgatcatcggcagcatctccggagtcagtccgacagccacggaaataccgaacagaaaggcatccagccagtctccctttgtgataccattgataaaaaataccagcggaaccatgaccagcataaaccggatcagaacccatgacactgcattcacgcctttggtaaagcttgtctccactgcttcacctgcaatcgcagatgccatggaaccaaacaaagtgcggtctcccgtgcagacaaccactgccgttgcacttccggaaattacattgcttcccataaaagcaatattgctgtaatcggtgatgctttctttctgtgcacataccttcggtgtcttttccaccggttcgctttcacctgttaagcttgcctgactgataaataagtctttggcatccagaatacggacatctgctgggatcatgtctcctgctgaaagatgtacgatatctcctacaaccagatcgtccataggaatctcaattttttcctgttctcttcttgtgacggtgcaagtagttgtgatcatggataacagtttttctgctgcatttccacttctggattcctgtacaaaacgaagcgtaccggagatcataaccatggtcagaataatcaccactgttaatggatcaaaatcttccggtgaacttcctaacagagaaaaatatggaaaaaccatatctgtcatagtagaaacaactgccagacagaaaaggattgctgtaaatggattgataaatgctccagccagacgtttcgcaagggattgtttcttctcatgcgttactttattcgttccatattttgtccgacttaccactatattttcagcatccagtccacgaagtgttgtgtgcagactcttcaaaacctccttaatcggattggtagccgcatgttcgatgcggtggttctgctcgtcacggatcacagcttgctgtgctgcctgccgaacagccatacgattttctttcttattcattggtctttacctccttgttttgcaattattttttataatatcgatcacttttctcgatataccaaagatcaaatcccgccacaataaaccatgcaaccatagcagtcacaaaccagtgattttcaaagcctgtccatagaccttttagcagaaaaatcaatccatttaatgcaatgacttcaccgatgttacgacaaagcggcacaattttaatcttctctttctcttcctgcggcatgtttttccaagaagagaaatgaatatggccttttccacatgcaaacataaaaccggcaatcgtgaaaatgataccaaaaaagatacaggttaaattcatggttttcttctcctttcattgattcctctcgttatgagcttatttattttctgaagcctgataagcaatttcaccatcgtaactgctaaaaaaatccaaacaaccacagatatttgataccagacctgtatcaccaaaatttggtgagccggaaatataagactcacacaactgcatgctgcagtgaataaaatataaagaatgaaaaaaattatccatctttcacttttgatttttttcaactacaacacctcccaacctgcactgattacttccggaagttccaatgcctgaccaacaataccttccagaacattgcttttcggttttcccgcagaacaatacttcgctatgatctcgactttatcccccacaacatctccactttccagatgattcagatacaaggtcttactggaattgctagtgatcagtaaaagtcttatttcctgttctgcatcttcctgacaaagtactgtgatgcagtattctttttcagattcatctcctacagcaatcggattaagttttcttgcaagcggacgcagaatcagatttgaaccaatcaaaatgcctgctgcagaaactgccattataaacattcctgtgctggcaagaataccaattgccgctgtacaccaaagtgttgctgctgtattcattcctcttaccgtaccgctgtctttaaagatcacaccactgcataggaatccaacaccggagataatgctgcttcctacacgaaacacctgatcggaaccataaagcattggaaataaagtaaaaaaactggttcccatacagatcagaacatttatccgtattccagctggatgcccggtcaactgcctttccaatccgataaaaaatccaagcaacacggataaagaaattcttaaaacaaaatctgtgtataccatacataccgcctcccttcgacctcttacagaatacaaaaaaagcaaggagaatcacatgaccaaaatcttgcgatttccttgcgatttagcaagaactatgagaaacacactccgcgagtttctcatagttatcgcgacagtcgccaaggcctcgtgcaagcacggactttggctcgttgttcgcgtaaattacaaaaaatttggcggactgctttcagcccgcctgttttacaccttatcattaaatttatatccgatcccccaaatcgtaagtataaactttggttcatccggattcggttcaatcttctttcgcaattttcgaataaatgccatgatattactgtcatctaaaagataattttcagaccatactgccttatagatctgctcttttgtaaatacttctcctctgttttccgccagaaaatacaggatatcaaactccttaggagtcagggaaaccgcttggcccattctagtaacgctcctgcttttcggattgattactaattccccaattttcatctcatccgaaagattgagagatgcaatttctgaattatttgcagtgctgagcagtaatgaatttatctcgccactcaccatatcatagataccagaaagcagttctttcgcactgtcactttctggtggttctttgatcagcttttgaaggagccattcctgcaggacagaatccatggaaataacactgatattctttttcatgatggtttccctcctttcagatcagcccatgatatttcttctgataaacagttttgaccaccgtagtcagaagcatatagagtaagactacaacaaataaaaacaggaaatacatgattggcaatttcgtcaatccaataacacctgcgcttttggtaaaagtaagtgaagtaaagacaataattcctgcaaaggtcgtacaaacaaccggaatggaaggactgctctgcacaaatggtatcttccttgtccgaagaaaatgaaggatcaaaacctgcgtccacatcgattctaaaaaccatcctgtctgaaacaaagcaacatactgcgactgcatcactggatctaccatgttcagatacgttgtatcgccacacaataatggacagagaatataatacaaaaacagaaatgtcacgatatcaaatatcgaactaataggaccaaaaaataacataaatcgtcccagcgtctttccggaccagtctcttggcgagagtgtttcttcctcatccacattatcccatggaaggatgatacataaaacatcatacagcagattcaataataaaatctgcagagatgtcattggcaaaaatggtaagaatgcactggcacatacaacagaaaaaatattgccaaaattagaacttgccgtaatcttaatgtatttgagcatgtttgtaaatgttttacgcccttccagaatcccctgctctaatacacctaaatccttttgaagcaatacgacatccgctgcatctttcgctgcatctaccgctgtatctactgaaataccaacattcgattcacaaaaagccgggatatcattgattccatctcccaagaaacctactgtatgtccattttgccttaaagcagaaacaatacggactttctgccctggtgttaattctgcaaatacatgaatatcttctactgttttgccgagttcatcgtccgtcatctgatccaaatctgcaccagtcaatatgatttctgacgggattttgacccttcggcaaatagatgctgccacatcagcctgatcacctgtcagtattttcggtgttacctgcagtcttttcagagcctccacagatgtctttgctgtctttttcggtgcatcaaagaatgcaagatatcccatcaggatcatattgttttcgtctgtcggtatgatctgatcctgtttctcaatctttttccgtgcaacagcaatcactttcattccatcctgcagcatctcatccactacagaagcaacactctgcatcccgtttttttccatcggtaggatttcgccacgaaattccacatgactgcaccgagacacaatctgggaaatattacccttcataataagctggcaatctccatttttatctgtcaccagtgtactaacaaatttgcgggaataatcaaatggaatttcatcctctttctgataccgcataagaagatcagaaaaatgctgttcatgcccaggcatcgtctggcaggcaagaattgcattatcaattggattacatacaccggaatggaaagcactatttaaaaaagcaaaatccaatacctgcccactttcgtttcccagcacatccatatagtattccaataggatactttcattggtcagtgttcctgttttatccatgcagagcacatccatgctaccaaatccttgcattgcattaatgtctttaatgattgtctgctttttactcatactcaggctgccccttgcaaggcaggctgtgatcaccatcggcagcatttccggcatcaagccaacggcaacagacagtgcaaaggcaaaagattccagccaccttccacctgtgatctgcaatagtatgaatacaataggaatcaatactgcaataaaacgaagcatgacccaggcaatagagttggctcctttttgaaaagactgtttttcatctggatcttctttcgtaaaactaccatatagtgtgtcttttccgactgcaagcacaataccctcaccttttccactgatgacagttgttgccataaatgcaagattttcaagttgcgtcaaggattccgaattactgtaactcaatgcctgtgcatttttttccaggatcgcactttcgcctgtgatcgctgcctgggagagaaagagatcacttactttggtgagtctcagatcagccggaacacgatcacctgccacaagcagaacaatatctccaaccaccagttcctcagctggaatctctttcacttctcccgcacgccgtacggtaatgctttcatgtatcagccggtttagctgttttgatgcattctttgcacgaagttcctgaaccaaacggattgttccgctaatcaaaatcattgaaaaaatgataaccgcagtcgttgcatttctggcaaaattcgatacaagaaccacatctgtagccagtgaaatgattccaagaactaaaagaatgatattaaatggattgatgaaggcacgccgcagtagtcgtaacatggtatcatttcttctttgcgagaaactatttacaccatacttctctctcatcaattcaacctgtgattgtgacaggccttcccctgatatctctaattcctgatatatttgtgatacttctcgataagcatatttcttaatacaacaatcgatcagtgtagttttaggcatatagacttgcctcctttctcaataccgatatatttattttaacattatcttaaaaaaactccatgcttagattcttgcttttttcttgcgattacattgataatttacttctacaccgcacctctttaaaaccaataaactcaaggcctttgttccgtcccttaaacactgccgtgacaattaaaagcaaagcataatacaacaacgttctgttcgatactagaaatatatcatcagcatacagtttgagcggaaaaagtctcatggtcatgagcgaaaatgaaagcaaaatttattagatggtacaacatactatgcctttaaaattccagttacatattcatattggaacctaatcatctgttatttttattataatacttgaaaaaaaagaagcactcatacaagcgcttcttcttaccatattaggacttcgaccaaaagttagtgggccacaaagtgggccatttttcaaaaaattacatgaatttatatagagttttatccaagtcgaaaatccgctaaatgctctagctatcagcatttaaaggcatttaacaacttatatggacatttatgaaacctgtctcgtaataacgattcctaacttcatactatatacctctttcctaaatttcctttattttatagccttttgctcttcgcaatcgcatcgagtgccacaataagcgccatttacacaacaccataaagtctatcatatttcccccacacaggcaagttttcttttctccccatttgaatctcctccccataccggcatccttccccctttgaacacccagccgtcagcccaccccatcctccaccaaccgcccgctagtacatcgtttcgtaaataactgtattattcacgctggatacggattcgagtgtgcagttcaaaaaacgtaggcgtagcgggctacgctgaggctttttgaactgtgcaatcggattcgtagacaagtgaatgatacagttattttgaaaacgatgtactagttgagcacgcgtttgagactacaggctcaaaccgagcgcagacccgggcagctggtggaggatggggtgggctgacggcgtcccctgtgtccaaaaaactatcttaataaaatataatagccgggtgacctcccagtgcaaggggaaaagcaaaacatacacactgggagtccccggttactaccaaaaatctattcagtttccgaaacctcagactggaatcccgccttttttaaaacgtaaccttcaacgtcttaatctcataaggtttcatctcgaaagtcgcctgattacctgtaaactctacaggatctgctccttcctccatcatattacactcgacaacagatgtcaattccttaccgaaaattagtgtcaccggagttcttctgttataacactcgtacagacgaacgatgacagcatctgaatcttccgctttttttacaacctcaatcactgcattatccttatcagaggaaaccagagaatattccggagcaagtgttcctccttcattctctttccaactgtaggtcagagggttattgatctggtaagcctgttttaccgtaccagcttctcgccagccgccctgatgtggataaatagaataggtaaattcatgcagttctttatcagcttccggattcggatgaatcgcagatttcagcatggacataccgatcacaccattacggacaccaacaccatacttgcagtcatttaacatactgacaccgtagccatcctcggacacatccatccatttatggtggcaaacttcaaattttgcaaaatcccaggaagtattgtcatgggtatcacgttttacattaccatactggatatcaaatgtagcttcgttggtatgtacatcgatcgggaagtagtcttttacaaagatctgatgctctttccagtcaattacattcttgatatcgattctcggaatgtcatgatacagataaataaactgtgtgatcgtggaatccagatatttacgctctacttttacgcaggctcttaccggaccattttccactacttccatcgcagacacctgatcgatatcccaggatttctctgtatagtaattgtttacatcccatgcatcatagttatgcggacggtcttcgtaacttacgatcacgttaccggctttgccaggtttcagtacgtcacgatttgcttttttatcatagatcttcgcaaactgacctttttcattatattctaccttgaagaactcattttccatcacttctgtggaaacttccattgacggtgttgtatctgctgcttcttcttttacaatataagtcttatatccttttccaggtacccctgctgcaaagaatacatatgcaccgtctgcggttttctgaactgccagttttgtctcgccgtcgtaaactgcaggttctcccataccgtccggaacagtaaaggtcaccagatcataagcagctgcactgttcgggttataaaccaccagggaatgtttcggtgcttttacaccggctgcgatatgagccagcgtcgcatcggtcagtgctttattctctgcaaagattccttcatattcagctttggaatcatcatatacttctttgatcgaagatcccggcagaatatcgtggaactggttacgcaggatgacctcccagccctcatgcagctctttttccggatatgcaccgcctgcggtctgtgcatccagcattgcgtacatttcttcgttctgatatgcaaattctgctttccggttgaactttttgtttcttgccatagaagtataagtacctctgtggtattccagatacagttcgcctacccatgtcggcagatattttttatcggttacatgtttatccagaacatggaagaattcttttgcagtagacatctttgttctcggcatacccgggagaccttttgccagacgtctctgattctccaacatatctttggttggaccgccgccaccatctccgaagccgaagctgcaaagtacttcttcgttcagatatttctggctgtatcgtgcccatgcacccttcatctggctcggattgatatatccgttataagtggtaaagtgttctgtctctgtaccaccctctactgctgccttattatagtcacgggtcggaacaaaatgtgtcagtacacggcttccgtcgataccttcccattcgaatgtatcatacggcatcttgttaaactcgttccagctgatctttgttgtcatgaaatacggaattccacatttctggagaatctgcggaagtgctgcagaataaccgaatacgtcaggaagccacaggatctcattgtccacgccgaactcttctttgaagaatctctgtccgtgtacaaactggcgaaccagtgcttcaccggaagcgatattacagtctgcctctacgaacataccaccgtccggctcccagcgtccttctttgactctttctttgatctgttcatacacatccggagcatttttcttcacatatttgtacagctgtggctggctggacataaatacatattccggatattctttcatcagttccagtacagtagaaaagcttcgaactgccttgtcttctgtcacgcgcagagtccacagccatgcacagtcaatgtgtgtatgtcctacacagtagatgatcgggcttttctcaccgtcacaatatttttcataaaattcttttgtaatatattcctgtgctttttccaggctctcataatactctttcgaaccttcttttctcatatccagcaggttcagagattcattcagtgcctgaataattgtaatatatgcctgatcttccgtgttcagtagtcttgcactctggtatggaacttctaggtcatagtaatatttctcggttttacgatccagtactttcaggctggagttcatcttcaggctgaagttctggtctccggtaaatgcggaaagaacgatgcgataggtatctcctgctttggcaggttctgccaggatgatctctctgtggttgacatccagtccctgtactctcacaccgttgacaaagatggaaaactgtggattggtcgcatcccattctccttcttttccggttttcagttcgtacaccacacattctccgtcaaactcttccggaatggtcactacggtttcaaaccagtagtattctctgtgtccgccccacagttcctgattggtaatctctttccatgatgaggtatccagattctttacgtccagacatctctcctcggtgcggatcatcttgtaacttggaatcgcaacctgcttcggatatacctgtgcctgcaaatattccagcattttaccgattctttctttgatcagtatcatttttgctacctcctgctaaatataatttacgataaccgttttttcccccacgatcatcaaaaaccaccgctggtgcccatggcacacagccaatacataaaaatgtgtaccttctgcatccagcgatggcctgatttcataactacattattgcaacaacggcatcagccttttgccgcaccagccatggtaaatcctttggacatatagttctgggacagaacgtacaacaggactgacggcagtgcgtaaatgatagagtatgcagccagcggaccatatgcaattgttccgtgctgaccgaagaactgatacagcataacagctgcagggagtttctctttggaacttaacaggatgtacgggataaaaaagttaccccagcttcctgagaatgtatagataaatactacacagattccagggaacatcagtggtgcaacaacctttaagatggactgcatggtagttgctccatctacccatgcggcttcttccagttctaccggaacaccatccatgaagtttttcatcagccagataccatacggaagaccggaagctgccatatacaggattacacccggaatgctgtccagaagtccgatgttcaggaacattttatataccggcacgataactgcgatcattggcagtgctgtcatgaacagtataacatacatgaactgctttttaaaggctaaatggtatcttgacagtggataggcagccagtccggataccagaacaacgatcaaagattctgtcagagcgataacaagacctactccaaatcctctcagattatcgctgcttgtcagtacagaaacgaagttgctgatggtccactgtgacggccattttaacgcctggcttgcgtttaagtcaaatgctgcaagaatcagccataccagaggcaggacaaagataattgcaatgattgtcagtattgcataatgaatcgctttcgttactttctcactcatcgtatctttctcctttcttattcttcgctcttaactacttttgtatagataatactacatacagcacctactgccagcagtaccataccaattgcggtaccctgtcctaactggaagttcttcatacctgcgttgtacatatagatagacagtgtggttgtttttgtaccaggaccaccaccggtcaaagcccagatcagaccgaatacacccagcgtagacagcgtattcagcatcgtgttggttgcaatggtgtctttgatacaaggaacgatgatacgaaccagtgtctgaatacgggtagcgccgtccacacgggctgcctcttcaatatcaccggatacattatccagtgcagactgaaagttcatcatggagaatgctgtaccatgccatacattagcaataactacggttgccatcggatgtgcatagatccattctactgccggcagatgaattgctgtcaatatagcgttcatggtaccggacatatcaaagaatgccagcatagccagagatactacgatttccggcataacccaaccaaccaggatgcacggtccgacaacgctacggaatgcttttgcctttcctttcatcagataagcaataacgaaaccaagaacactctgacctacaaggcttccaatcaggaaaatcagtgtatttttgattgcaatcagtgtgttctgatctttgaaaattttaacatagttatcaatgcctacgaactggaagttctgcgcattggctcctgttaatgccatattggtaaatgaataataaattgtcaggataatcggaacaataaaaaagcataccagaagaatcactgccggaagaagcaggattgacttcttagcttcatctttgatcatcgctgcgcgattcggttttgccatggtcctttcctcctatttttacatactctttttgcttcaattcttatacgagaaagcacttttttgttgttttttcgtataaaaatgcgggctgccagttgtttgtgcagcccgcaccgttattgcactttactgttttgtagtattttcttcaccaacagcgttcgcaacactggttgcatactgcttcattgcattttccggtgtatcaccacttgctaccgcttcaaccatctgctggatagaagtagatacggttgaatactggtcattctgtggtctgaatgctgctacatccaggaattcagttgcctgagccatgaatggctgagaagcataatcttcgtcttcagtaatatctgttcttacagatgtgttaccagactgcataatgtacgttttgtatgcatcataggtattcagctgttcgatgaattccattgtcagatctttgttgtctgagttttccggaatggagtaagcccagccacctgacattgtgatggttccatcgccctgtccgttctgtgtaggcattgcagccaatcccattttctcaccatagttttcatatggagaagctccggtatctttccagttacctgcggcccagctaccatccagggagattgccagtttttcctgtggaatatactgctgaacagatgttgtggaagcagaaccattcagtaccagagacagagatggtccatatccgttgctatagatatcagagataaactgcagagaatctttgattccctggctttctgtgatccattttccatcgtctgtgatcagtctttcgcctgttccgtacagtaacatttcgtatgtctgcatggaagttgattcaccggttgctacaccggagttacaccagaatggtacgacatccgggcatttgtctttgatcttagcacaagcatccaggatatcatcccaggtcttcggtgcccagtcttcgccttccttgataacacctgcttttgtcaggatttctctgttgtaccacagtccacgggtatctgtacaatatggaataccataaacttttccgtctgttgtaacaacttctttcatcttgtcatagaaagttccatcgttccaggtatcccagtcttttacgtaatcgctcaggtctgtcagataacctgcttctacatcgttcggtaactggaaggtatcttcgcataccagatccggacaagtggaaacatcacctaactgcagagcaatctttgtgaagtaatcgccttcggaagctgtaatcggttcgaagtccagttctacctgatcctttttatcccagttatcatatgcatactgcatagcctgataattggcactcaatttaatatctgttccgtcatcacgccatgtgattgtgattttctttttatctcctgatgagctgtcatcagattttgtgtcactgcttgatgagtttgtgtcgctgctgctactagaagatgagttggaaccgccacatgcagtcatgctcattaccattgcagaagcaagaagaatacttaagatctgtttctttttcatgtcgttctctccttttctttgttgactctgtcgtcattcgatggttctatattaccaaccgttgtatgttttgtatatttgaaatttttaacaaaggggtaaatttttgacgtcatatggaaattcacaataaaaaaagacccctggatattattctttgacataatatccagaaaagtcttttacggttctgacataatagatacccgtacctgatctcgtgtgttttctgccacctttgcctgtgatgccgtactcatacggttattcaggacttcgctcacaccgtctgccacatttttacagatatctgaccaggaatggtaatataccatagctcttgcttttgcaggcagtccgctggttccctccatataaattttcccgttttctttataagaatttccactgtacacctgcagcgttcccatggcatcattgattctttctgaagtatcctgttttgtcagatactgtgcaaaagccagtgtaccggttcccgcttcttttgttatgcagacttcatccccaaaccagaacgttccgccagcattgtcataaggtacttccgccatacccacggtaaagttcgtctgattacttttcagaatactggtaacactcatttgattgatcatcatggttacccgtccttttgcaaattcctgtgcaagatcttcctgggtaaggttggttgcatggctggatgtcagttctcctttggacagttcaccaaagttctgaaaacatttttcccacagttcctgattcactgtattcagattgtccccactgctgtacatcataatccagtacagattggtaatttccgcttctctttttgccgcaattccaatactctgaagtcctgattttttaacctgatagcctgcccggataagttcattccaacttgtcggtacctccacattcctttctttcaacatatccacattataatataatacatagggatcgcaggtcagtggatatccataatattttccatcatgttccagtgcctgccataatttatcatctacgataccttccttcatttccctgctgaccggtacttctttaagtaatcccttctgtatcatctcctgcaccatcgtattttcacagatcaccagatcgatctgattttctccggtcatcgtccgaagagaaagttctttttccagattttcttttggtacatacgtgatctctatctgcggatgagactcatctctgctgtattctgccgctaccgtattcagaatctgctgatgcagcttcgcctgatatggggcaagtacccgaatcacctgacttttttcttcttctgttgtttcctgttcattactcgcaaaaaacgcggtatacagtacaatcagcaccaccagtgtaatggccacaagaatatgtaatatctttttgaacctcatcggctattctcctttttgtattctgccggagagattccgcagatttttttgaagactttctgaaaatacttctggtcgctgaatcctgcagcctctgccacttctgccaccttataattgccggtagccagcattctttttcccacgctgattcgaaaatttgccagaaaatccacaaatttcacacctgtttcttctttaaaaatacgggaaagatattccggactcacattgcaacactgtgccacatcggaaaggccgataggttccatataatgttctctgatataagcaatggcattcaatacaatgccattttccgtaattttttcttcgttttcttcattccaggcaattgcctgatttacaactttctgaaactgatactgtagttctttctgtgtatggctgctccggatgctttccatcatatatcgcagttcttcttcctgattggcatccccccgcatctctcctgccacgcgggcaatccccatcagaaagcgcagcgtatagttgcggatacattccggtgttgcccgacttaaaattacctgttcggaaaatgctttccctgcttccgtgatcttctctttcttcccgctgcgaatgtcctgcaccatctcattttccattgctgtgggataatccaacttttcatattccatcatctgtgccatcttttctgtcatgataacttcatgaccggtacaaaaagtatgttccagaagtgctgacagttcattcattgtatccgggagctggctgattccttcaaatcgtttcatagttgcgacgcaggccgtgatatcctgaattttgggcatgattctcagttcaaagattcgtttcagtgtccggtttcgttctgtatcgaccaacactacataaattcctccctgttcccccggacgaagcaacatatagtaattttccatacagagagcttccatctgattttccagttcttttctcagctcaccataagattcactggccatactgtccggatgaatcagcaacatggtaaactgcgtatcttttgtcacccctatcttttcttcaagcattgggcgtatctgttctctttgctctttgctgcttccgatataattccacagcagtcgctctggtgtcacctgctccgctttctgttttacgatccggctctccacttttttaagtactcccagaaactgatcaatatccatcggtttcagtacatattccacaacccgcagctgcaatgctcttctggcatattcaaattcagaatatccggtcagtaaaacagcctgtacctcaataccggcatctttaattttctgcagcatccccagtccatcaagcaccggcatcttaatatctgaaagtaccagatcaggcttctgttctaccgttaaccggtagccttcttccccgttttccgccacacctgcaatttcataatctgtaaatctccggatcaggcgaatcagtccttccctggactttggctcatcttctgctatgacgatccgcatcacattttcctcctttatttttctgtatttcaggaatctttctacgcttcataagggattttcatcgtaattcttgttccttccctgtctgtttccttccaggattccacataaaaacttccctgacctccataataaagtttcagtcgggtaattacgttgcgcacaccgatactggtctcaatcttttctttctgataatcaaaatgattgaacagttccacctgttccggactcataccgacaccattatcctccacaacaatctccaacatcccttcttttcccgtacgtccgatccggatatttacttcatccatacctgtatttcccggaaaagcatgtaccagtgtattttccagaagcggctgaatcatcagtttatgaattcgataatgccgcagaccttcttccacatcaatggtacagataaaggaataatcgaatctctgttgttgcagatacacatattttttcagatattccaattcatcctgaatttccacgatttcattgctcttatgaatgctgtaacgcagaatggcagcaagacttgtaagcatcttgcttatggtatattgctcgctatccagtgccacccagttgatggcatccagtgtattatacagaaaatgtggattgatctgcgcttccagcgatttgatttccgcattcttcacacgtaccagcgattctttttcctgctcgtttgactgatggatttcttctatcatatagttaaactgctcggaaatcctggtaaattcatcatttccccgcacttcaattctggcttccatattcccatgatttgcctgatccatggctcgaagaatcggttttaccgatgtatccacctgactagaaaagtgaagtgtcaaaagcaggctggcaaggctggcaagtacacaaaagcacacgataattccaatcatatatcggaaatttcgcagtgcataatcggtatcctgcacgttgattacgtatccgcctccttcctgaagctggatactgctgaccagtaagtttctgcttttcaacagttttcgttccttcacatacaaaagggcggcctgttccagtcgcttttttccgacactatctgtcagattggcatctttgatttgacggatcgtatcctccggaagaataccggtctgctccgtgagattaatattctccggatctccggtagaaacggataacagatctccgtaaccgttcacaaccatcgtcagatttgatttcgtattgcttttttcgtaaacctgtcgaagtgcttcttctttcacacagatcacaagataaccatatggtcgttcatcgctgtctttttccagactctccagcggagaactcacataaatgacatcgcttgccccatattcccgatcactgatatgttccaatgcggaatacgtgatttttctgtttttgataatttctttcactttttgtccgtttccgtaagtctccatcggaaaacaataactgttctgactggatactgtcacttcatcataaaagcaaacgtcatatttttctccgataatagcgattcccataatacttggattgctgacagtaatattttccagacgtctgcagatctttgtttttgcatcattatactgacttgcatcccatcgattgatgtattccatttgatcccgataaaaatcatccgtatataccgcctggataatcccttcacaggttctccagaaacttccgacattacttgcggactgttccagatttgcctgaatcagttcattggtctgactgtgtataatcgaagaactgatctggtaaactacgacaagcaaacagaccaggggaatcagagataccagcaacaacatcaaacgtatctttcttgccagttccagcctggaaaaatgtgtttggatattgcttatgtatgttctgattttattcacctgacctgttcctctcttattttatctcaaattttttttttcatggaaagtgcaaacaatgcaaacaaagagtttgcccatgcaaaccattccctggtgaattttttcggatcctgacaatcaaatccttcatgcattactttgcagtccgcatcagtagaaagaagcgttttcagcagttcttctctttctgtctcatcatcagaagtcagtccctgcatcgtcagagcgatgtgccagatatactgatccggggtatgcgggcttccgattccctttgcacagtctccctcaaaataatatggatttttcttactcagcacaaaggctcttgtatttttatagattggatcctctttgccacagtacgccagccacggaagggataacagactcggtacgttggcatcgtccatcagattgtagttgccaagaccatctgtctcatatgcatagatttttccaaaggtttcatcctccacaataccatacttctggattccttcctgaatctctgcctgcagttcttttgcttcttttgccatctgcggatcctgaaaatctttttccaaaaattctgccatataatccagcactacacttgcaaacatattggacggaatcaaataaccatatttgcaggcatcatcacttggacggaatcccgaccaggtcatacctgtataaccaaccggtgcaccttttccgtcattgcttaaggtatcggatggcggacagttcagacgcacaaaagaatactcggaattctcatggtactgttccgtctgccatacatccaggatatcgcggaacgcctgttttacttccggtgtaaagacatctcttgctccggaattctccacatactgtttgatcagccagatcgggtagcacagagaatcaatctcatattttctctcccagttccacggattgtattttgtcagatctttctcccagcagtttccgttgtcttcttcgttaaatgcattggcatacggatcaatatgtatatatttagcctgacgggcaatcagtccttttaccatctctttcaagatcggatactctttcagatacggcagatagtgaacaacctgtgcagaagaatctctcagccacatggctgcaatatctccggtaaagacatacgcttctccactctccagaaattttgttgtggtttttgcggtgctcacataacagttctggaaggtttcctgcattttcgggtttccttcccagtatgctgcttcttttctggcgatctcttctaccgcctgcaccagtacttctttcttttcctgtgtgttcatgtaaaaatcctccttgtttttcattctgtaactgttcagtctctcgcgggatactccctgctgaatagtcacttcagtctttgctttgtatcattaacagtacaccctgttcccagctgacagttgctgtatccgctgtaatctcattacttacccccagaccttcccggtcttttaactgataatgatccagcggatatttaaatccttcaagcgtcagtccttccacggtttctcccatggggaacagagacacataggtaccatactgttcttcttttctgagagaaaattctttttctaccggaagaccgatcttatttctgctatccacgatccatgtcggtacttttttctcccatgctgtttttaaaatctgtaaattgcagaccacatggtcaatccgggttcctgttgcccccagaatccagatctctgtacttccctcttccagagctttatccagtgcaatctttgtatcggttgcatctttcaccggattgtaagcacgaatcggaatctcgccctcctgtcgataactttccagaatttcttcaggaagactgtcaaaatctcccacaatataatccgggcgaatcgcctgttcatagcaaaactgaagtcctctgtctaccccaagaacataatccggcttcagactctgtataaaagaaagggcaaactcattttcaatcatgccccctgtgataatcagcgttttcatttatctgcgctccattctctctttcaagcgttgaacattttcttcgatatttccaccaaagacggcagatccggcaaccaggatattagcacctgcatccagtactttatcaatggtcttttcgttaattccaccatctacctggatatccacatccaatcctgcatcggtaatcatttgacgaagcttctgaacttttccggtacagctttcaatataactctgaccgccaaatccaggattgaccgtcataaccaataccatatccaccagatccagcacacattccagctgactgaccggtgtacccggattgatcgccacaccgaccttcattccggctttacggatctcccgtaatgtgctgtccagatgcttacatgcttccgcgtgtacggtcagcatatccgctccgctttttttgaattcttcaatatatcttcccggctcctcgatcatcagatggacatcaaaaaacagagaactgtttttacgaatggatgcgatcaccggcatcccaaaggaaatactcggaacaaatgctccatccatcacatcaatatgaagccattccactcctgcttcttccacctgtcggatctgctctccaagacaattaaaatctgctgccaatatagatggtgataactgatacatcgcttaatatctccttttttcctgttctttcagctcttcataaaagccgacataatttttataacgctgtctgtgaatttttccttcttccactgcctgtttaaccgcacattccggctcatgaacatgcacacacccctgaaacctacattttccttcatattccgcaaactccggatagtggaaccgcagttcctctttttccattctctccacaaacagagaactgaatcccggtgtatccatcagataggtgtgttctcccactgtcagaagctgtgcatggcgggtcgtatgacgaccacgtttcagttttttactgatctcgcctgtctccatgctgacttcttcctgtaagagatttgtcaacgatgattttcccacaccggatggtcctgcaaccactgttgtttttccttccagaatcttactgatctggctgattccttcctcctgttcggcactggtaagcagcacctggtaaccacaggaaatgtagatctgatacatctgatccagttcttcctgctctgcaagatcttttttattgaaacagataatactaggaatcccctgctgttccattgtaatcaaaaagcggtccaacagctggtagttcggatccggctgacggactgcaaaaatcacaagtgcctgatccacatttgccgctgccggccggatcagttcatttttccttggaagaatctgtatcagattgccggtcttttctttttcgtccagaacttcaatctccacattatctcctaccagaggttttttcttctcttttctgaagattccctttgctttacattcataaattccggactctgctacgtccacgtagtagaatccggcaattccttttataatttttccctgcatagatacctcttaagactgtttaaacggcacattagaataatgtccacgttctacataatctccgtctaccatttcccgcagatatacggttccggtatccaccccatctgcaccggcaattgccagtgtataagggaatgtaatcgtctgtccgtccagaatcacattctccacgttctgtccattgacattctgcaccagagtcagctgcaccggtcccccggtatacgtagatggctgatccagttttacattacaagtccagcttccggtatcgctgtcggaagcatctccctctgcaggtgcctcattcggaagagttgttgtctcaggcgcatgataaacctgaagcgtaatagtagatcccgggtctacagaagttcccgctgccacactctgatttgccacacagccttccgccacattaccggacgcatctgtagttgtctctacatttacctgtaatccttgatcattcagtgatttcttcgctgttgattcatcctgtccgatgacattcggtacttctacttgtttgttctcttctcccagactgacaaccaatgtaatggtggatcctgcatctacctttgttccttcggaaggatttacactgataacttttccgatggctaccgtatcactgtaatcctgctgaatctcagtattcagacccagtgctttgatcagagcttctgcctcactctgtgatttaccggttacactcggcacactcggtgcatctgttcccgaacttacaacatagttaattaccgttccctgatctacttttgttcctgcctctgtttcctgagacatgatggttcctgctttatattcggaagactgactttctccggtcttgtttccctttaagccaagctgttccagaacactcaacgcattttcttctgtcatgctggtcagcttcggtacagatacctgtccgttttcatctactgtatcatcaatttcttcctgttctgtctgctgagtgtcatctttttttgcagttccaccgatatttaccagacctgctgcccgtgcaataaagaaaatcagaatacagataatgatcgcaccgataataaatccgccgatagtcatagctttttccagtttggaacttacttcgccatcctcatcgtcttcctcatcgtcatcatactcgtcatcatattcttcttcgtcatcatcctcttcctcctcatacgtatctttctgaggagtggcatatcctgaacggccttccctgatggcttccagttcatcatcggaaagcatcaccgtctgtgcatgctgtgccagcggtgtcactacaacaaaatttccattcggatccagcagcgaatgtttcagatcttcaatcacttctgacatgttttcatatctgcggtcaacgcttttctgtgtacatttcagaatgatctgttccagactgtatggaagatccggtacatattttctgggtgatacaatttcttcctgcagatgcttgattgcaattgcaacagtagtatccccgtcaaatggaacatgtcccgttaccatctcatacatggtaataccaagcgaataaatatcactcttggcatcactgtaaccaccacgtacctgttccggtgaactgtaatgtaccgatcccatcacattggaactgatggtattggaagaagctgctcgcgcaataccaaagtcagacagctttactttaccatctacagatatgataatattctgcggttttacatctctgtgcacaatattgctcttatgtgccgcctccagtccaagagaaacctgaatcgcaatactcgttgcctctcttacggaaagttttccttttcttgtaatatagtctttcagggtaattccctgtaccaactccataacaatatagtaaatgccgttatcctccccaacatcatagacatttaccacattcggatgcgcaagacctgctgcagcctgtgcttccttgcggaatttggaaataaagcctttatcttggctgaattccgctttcattaccttcactgctacgagacggttcaacttatgatcttttgctttgtagacatccgccataccgccgctgccgattctgctgatgatctcgtatctttctcctacaatcattccctcttttaacattctttcacctcgtttgtaaatggttcgattagaattactgatatattatctctgcccccgtttgtattggcagttgccaccagttgtctgccggactgttcgatatccggtgaatcccccagaatcttctggatctcctcatccgccaccatattactcagtccgtctgaacacagcaaaatccgattcttttcctccagctgcacatcgaagaaatcgatatccacctcttcggacgctcctaatgctctagtgataatgtttttatccggatgattccgggcttcctctttactgagttctccccgcatcaccatctcggcgatccaggaatggtctctggtgatctgcaccaggccctgttcaccggaaatatacagacgactgtctcccacattggccacatacgcataatatcccacaacggtcaccgccacgagggttgtccccatgccggcttttcctgcatctgctttcgccagctcatgaatcttttcattcgcttcctcaattgcatgacgcatgatctttataggattaaaactcatatctttttttactgatgcctcgattacagaaacggcacagcgtgaggcaaaatctccggcattatgcccgcccattccatcggcaagcacaaacagatttggaagatttcctatcggctgctcggacgcatatacataatcctgattctgacttctgacctgtcctacatctgtcaaagaaaatgacttcatgccagcttctcccttgtctttttatttgtaactgttcagtaccttcacagtcacttttatttttcttcggcggagtcttttgttgtattttcctgccggtcactgtattttttcctcagctgaccacaggccccatcgatatccctgcccatttctcttctaatagtaacattaattcgatatttttcaagtttatttttgaaattctctattacttttttgtcagactgtacaaaattccgttcctttatcggattaaccggaatcagattaatatgacaatttaatccgtgtacaagtccggccagctgtctggcatcttcctgactgtcgttctttccgcccaccaggctatattcaaaagtcagtcttcttcctgttttttcaaaatagtatttgcatgccggaagaacctcagacaaagaatatttataggcgatcggcatcagttcttttctcttttcatcatttggtgcatgaagagataatgccagtgtaattgtcagatcttcctctgccagttgtcggatccgcggtaccaggccgcaggttgacaccgtaagattcctctggctgatattctgtcctttttcatcgctcagaattctgataaatcgaatcagattatcatagttatccaacggctctcctgttcccatcacaaccacattcgacacacgctccccggtcagttcctggatccggtagacctgatccagcatctcggacggcagaaggtttctggtcagtccaccgatcgtagatgcacagaaacggcatcccatccgacagccaacctgggaagaaatgcatacggaattgccatgcttgtattgcatccatacactctcgatcacgttaccgtctgccagctgaaacaaatacttctgtgtaccgtcaatctttgaagtctgaacttctacaacttccagatgtgtcagtggctcctgttctgtcagcttttttcgcaaaccttctgacagatttgtcatttcctcatagcttcccgccgctttctgatgaagccactgatacagctgtttccccttgaacggtttttctccaagagaaatcatcttttctttcagttcttcttcatacagcgatttgatatctaattgttccattatttttcctctttttatcactgatgtatccacagcattttccgcatctgtttcttacagagctgtccatccggcgtttctcttactttttccgcatccttgccagaaagaaaccatctgtcttatgcactccgggaagcagttgcagccagccctgggcggtggtttcactgtgcagttcttcgcacagatacggatccagactttccagtacaaatggataattctccgtaaaccatgccacattgctctgattttcctccgatgtgatcgtacatgtgctgtaaatcagaatgccgccgggttttacataagaagctgcattgtgaaggatctgtttctgaagcactgccagctcctgaatcttatcttcatccgtacgatacttgatatctgttttctttccaataactccaagaccggaacatggtacgtctgccagtacaatatctgctttttctacggattctttatctaaaagtgtggcatctttccgatgcgcacgaatattcagtgtctgtgttctttcaatattttcctcaatgagacccactttataatctgtaaggtctcttgcatctaccataccctgtccctgcatcttatctgccatatgaagactctttcctcccggtgctgcgcaaagatcgatcacataatctcccggtttcggatctgctgcttccgttaccagcattgaacttacatcctgcactacaaaccgtcccatcacaaaagatttaagcccttccagatggctgtaatctgacagatagaatgcatacggaagatatggtgcctgttcaaccgttgctccctggcctttcagactgttgaccgtcaattcctgctccacccgatacagctggcatcggatcgtcaacggatgatccgtcagaaaatcttttaacatgcattccgttgtttctgttccgtaagtttgtacccatcgttttaccagccactgtggtaccgaataataaaccgacagatattcctccggatccctgttcttatccggataaataatctcttctttttttcttgccacattacgcattacgccgttgacaaatcccttcaggctgtaaaatccttttttctgtgccagttttaccgcttcgttgcaggctgcagggtccggcacgctgtccataaacataagctgataaacaccgcttcgaagaatgttacggatcaccggtttcatcttatttactctgacactggaaaactgattcagaacataatcgatccggagcatatattccagagttccctccacaagtcggttgataaatgcacggtcctgtttcggaagatactgaactttattcagagcatttcggattgccagatggctgtattctttttcctgtgtaatttccaataatatctccagggcgattccccgaagttctgttccatttgccacgtttttttcctccggttgtttctgttggcatcgatttccactgattcaccggtataacattgataccggtatacagttctgaaaacacagacgcagcagtggctacgctgaatcttcgaaaactgtgcaatcggatccgccgccaagtccatggcgcatttatttcgaaaatgatatactaacagggaagtatcatcccttcttccaccgtatagccacgtaaaaatgcctgcgtatccattcgttttttcccctccagctgcagggtatcaatcttcagaatcccctccccggtctgaatccggaatccttttgcatctgcctgcagtacagttcccggtgcttttttttcaccgttttcttcttccacagatgcttcccatattttcaaagtttttccgttcagatgggaaaatgcacttggccacggattcagtccgcgaatcaggcgttccagttctgttgctgattttgcccagtccaactcacccatttttttactgatcatggctgcatacggcgttgtactctcttccggctgtttttcaaaaacggcactgccgtcttccagcatcggaagtgtctcaaccagaagtttggcccctgactcactcagacggtcaaacagactgccgccagtctctttttcattcagcggaacaatcactttattgatcatatctccggtatccacaccttcatccatccgcataatagtaacaccggattctttatcaccgttaatcacagcccactgaatcggagccgcaccacggtaggccgggagcagggatgcgtgtacgttaatacatccatattttggcatatgcagaatctctttcggaataatctgtccgaacgccaccacaacgatcacatccggattcagttctttcatcacctgaataaattccggatctcttacttttttgggctgatataccggaagtcccagttccatcgccgcctctttgaccggtgtgggctgcaggttctttcccctgccctttggtttatccggctggctgatcacaccgacaatctcatgaccggccttcgccagctctcttaaagtccccacagaaaaatccggggttcccataaatactactctcatctattctccatcctcttcttcgtaattcacatcgtgcagctcaccttccacgtgctccacgtacaagataccgtccagatgttcacattcatgacagattgcacgtgccagaagtccctctcctgtcagaataaacggttccatattaatatccagtgcttctacggttactacattcggtcttgtcaccacaccggatttgcctggtaccgaaagacatccttcttcccctgtctgttccccggaagtctctttgatcaccggattgatcaatacatacggaccattctcatctccgatatcaatcacaacaattcgttttaacattcccacctgtggtgccgccagtcccacaccataagcatcatacatggtctccagcatatcttctatcagttcctgaatctttggtgtcatctcttccaccggtctgcagactttgttcaggattctgtctcccatagttctgatttttctgattgccattctttttcctcctgtcagtggttaaaatctagctgaatccgaatttccctgaatccgctgtttacttctatatattgttccagtctgctctttgcccgcagcagcagctggtgatcctcctgttttatataaattacttttcgatacatatcggcgatcttcgatacggtttcatctgcaggtccgatgatctgcagctgtccgtgactgtccacccggttcaggaatttttttatatattgcattcctgtctccagtagttcctcattaccacagcttccatggatcgccagcagattggataccggtggataacccagaagtttccgataaccgatctcctcttcataaaatgcccggtaatcctgatgcatcgccgcctgaatactgtaatgttccggttgatatgtctggataatcgcttctccgggcttttctcctcttcctgctcttcccgctgcctgcgtcagtaactgaaaagtccgctcacttgcccggtaatcactgatattcagtgaaagatccgccgccagcactccgaccagcgtcactttcggaaaatcatgtcccttgacgatcatctgcgtaccgatcaggatatctgcctcctggtttgcaaatgcagccagaatattcgcatgtccttctttttttctggttgtatccagatccatccgcaaaacctttgcctgtggaaaccgcttttttacaatttcttcgatctgctgcgttcccgcacgaaatcctccgatatagggtgatccgcacaccggacactgctgtggttgtctcgtctcatacccgcaatagtggcacaccagttttccgttccggtgctgtgacaaagaaacatcacagtggggacatttcatcactgtcccacaggaacggcaggagaaaaatcccgcatatccgcgacgattcaaaaacaacatgatctgctctttcttttttaaccgttcttcaattttttcctgtaaaatactgctcaagattgaccggtttccctgttttaattctttcctcagatctacagaataaaccttcggcatctgcctgttttcatatcggctgttcagttcaaacagccgatacgttccattctgtgcctgataatacgcatctaccgatggtgtggcacttcccagtaccaccggacagtgttccagattgcctctctcaattgctgtctctctggcatgataacagggcaccgtctcactctggtacgaagtttcgtgttcctcatcgatcacgatcaacccgagattcggaaacggggtaaacagtgcagatcgcggtccgatcatcacctgcagttcccctttttttgcccgttcaaactgatcggaacgctcaccgggagaaagccgggaatgtaaaacagagattctgtctccgaaccgccgatagaaacgctgcactgtctgataagtcagcgcaatctccgggatcaacaggatcacctgctttccctggttgagcacttcttccatcagttccatatatacctgggtttttccgctcccggttaccccgtgaatcaccaccgggcgaaaatcgttttctctccagccgttcagaatcccatccgccacttctctctgtgccggtgacagtagtgcttttgtctgctcacattccgtagtccggatgggattacgatacacttccgtagcctgtacccggatcatccctgtattctccatggcctttatcacactggctgtcagatgcagtttatccattgccaatgtataagagatcgtatcattctcaagcagtgcctcgagaagtctctgcctggccacataatgttttttacggcacagttccagctgattttctgcttcgtctttttcgagcaacagacggatccagcgttcttctttctgtttcatcttctgttttaccggaagtaccgtctttaacgcctgaatcatcgtagcgccatactgctcccttatccaggcagcaagtgctatcaggcgggattcaatggaattgcttcctgtctccactccccggatctctttcatgcggctgacatcaaaagaaggctgatccgtcacccggatcacgtatcctttgatcatccttcctccatttccgaaaggaacctgcacctgcatccccggttgtaacctgccctccagatgctgtggaaccagatactgaaaggatctatccagtttttcgctggtaatatctacaataatatccgcatatgtctttatcatgcttttttcttggcatcttcttccagaatctcacggatcagtacacgttcatccatcggatatttctttcctttgatctcctgatagtcttcgtgaccttttcctgcaagtacaatgatgtctcccggttgtccatgatgaatggcgtaagcaatagcttctttccgatcgatgatctcaacatattttccttctgtcttgctgatacctgttttgatatcatcaataatcgcctgaggctcttcatttctcggattatcggatgtgatgatcgttagatctgccagcttaccggacacttctcccatctcaaaccgacggtcacgggaacggttaccaccacagccaaacagacataccagacggttcggtttatattctctcagtgtggtaagaagggattccaggctcatcgcattgtgtgcgtaatcgatcatcagagtaaaatcatcggataccttttccatctcgattctgccctttacttttgcacatttcagggctttgcatatgttttcttcagatacgttaaaatgtctgcagattgcaatagccgtcagagaattgtaaatactgaattttccaggaagatcgatttccaccggaaaattcaacagtccctgcagatcataggagattcccagcactcctttttttgtaagcagttcaggattgaccgcgcgaaggtctgcctccggtgaaaatccgtaagtctccaggctgcaggtatgtccgtcaatgatcttctcataatgttcgtcatctctgttgacaataccgatccggcactgacgaagtaacatctttttacaggacaggtaatgttcaaagctggtatgttcgttcggtccaatgtgatctggttcgatattggtaaagataccgatatcaaaggtgaatcctgcggttcgatgaagcatcagtccctgggaggatacttccatcactgcacagtcacagccttcatccaacatctgtcgcagatatttctgcaccagaagagattccggtgtagtatttgcagacgggatcacggtatctccgatgattgtttcgatggttccgatcagacccactttgtaaccggcattttccagaatggattttaccatgtaggtcgttgtggtttttccttttgttccggtgattccgatcacacgcagcttatctcccggataatcatagtaggctgctgccacaagtgccatcgcataccggctgtcctttacctggatcactgtcacatcctccggcacttctaccggttcttccacgataattgccttcgttccctgtccggctacactttttgcaaatgtatgaccatccacaacagcaccacggatacagataaaaagagaaccttcctttgcttttctggaatccgcaacgacttcttctatttcctgatcgagagtgccctgcagacatgtatattccaaacgttctagaatctttgataatttcatcaacttcaacctcctttggatcgcgggcaggtcaattgcccatagatatttatagaatagcatatttcgcacaaaaaaagaagaggggggatgggattttgcggggaaatggttgtaaggcggacgccggagaaggggacgggcgggagcggggagggaggggcgacgcgtgggcaggggaactttgagctagccgctaactccggctattattcacgagggtcagctgaccctcgcgaaagcctacgtaagcgtcggatctcaaagcttcccctaaccgcccacaaagtgcgttcgccccttccctccccgctcccgcccgtccccttctccggctgatattcgttggaactggtgatgaatttcccggaaaatccctggtgaaagagcgatgggtcgctggttttatgttttcgtagttgttctattgatgtatggtaactattcagtagccattatcacgcgaggtgttttggcataaatatgccaaaatcccgagacatacaagcgaaaatgccatcaccgaaggtgattttaaatgcatttttgctcgtaactgtgaagttactgaacagttacgatgtatgtagtatttccttctcccagacccgttcatttttcaaccatatcaatctttttcatcactcagtttcaaccggtacacagccggcatggcttgggagcctgggtgcgggaacgtgggcagagcaactttaagctagccactaactgcgactatattcacttgggtcagctgacccaagcgaaagtctccgtaagtgtcggatcttaaagcttgctctaaccgcccacaaagtgttcccgcacccaggctcccaagccatgccggcgtccccttgaaaatcaaaaaaagaactaccgtcttcaaaacacttcattttgaaaacgatagcccttttataaaaaagcaatatacgctcttagtagatcactgtacccgtccgtccaaggtacgcatccactgccttatcgattgaagtaatcacagccttctttccttcgccctgttccacgaactcgacagaagcctggatcttcggcagcatggtgttggcttcgaactggccttccgccatatactctttcgcctgtgcaacagaaatctcgcccagttcttcctcatcctgcttgtggaaattcacagaaaccttctccacactggtcaggatcagcagttcatctgcatccagctgttctgccagacgaccgctggtataatctttctcaataaccgcacttgcgcccttcagttccgtaccctgctcgagaaccgggattccgccaccgccgcaggcgataacgatctgtccggcatcaagcagtgcacggatcgcatcgatctcaacgatcttctgtggcttcggtgcggctacgattcggcggtaaccgtcaccgatcttggtaacgtaattacccttattttcttcctcttccgcttcctgctcattcagcacacgtccgatgactttaacaggttcagcaaaagcttcgtcatacgtgtctacggttacctgtgtcaggatcgtggataccggtttgtagatgccttctttcatcagttctgcacggatcgcattctgcaggtcgtatccgatataaccctggctcatggcagaacacacggacattggtgcgtatgtataatccggatgatactttccgaattcattcattgccatatggatcatacccacctggggtgcattactgtgagaaatcacgacctctgcaccctcttttaccagctgcgcaatgatttttgcagttctttttgtagcttctttctgctccggcaacgtattaccaagtgcccggtgtcccagagcaatgacaactttcttcttctccatgttacgccctcttactttctctcatacataatcgggtaaaaataccttttgcgaatttcacccgtcactgtcacggtatttaccgaattccatacagacatgggtttcggtttatgatctgccgataccggtttctgttacagatcaacacctctatcgttagtttattcctgttttcctctttatgcaagcaggaaataagcaagtaccacaacaccaagagcgatccggtaccatccaaataccttgaaatcgtgtttcttgatataacccatcaggaacttgatcgctgcaatggaaacgccaaaagcgacaaccataccaagcaacagatacacaacctctgttccggtaaaatacagaccgaattttaccagtttcagaaagcttgctccaaacataaccgggatggcaaggaaaaaggtatattccgctgccagttttctgctcatgccgaggagaatacctccgatgatggttgcaccggaacgggaagtacccggaatcagggcaagcagctggaagattccgataaacagtgcatctttgaaagaaatatcactgagctttgttctgctgggcttccggcttttattgtagttttcgataacaataaacagtacaccgtatacgatcagcatcacggaaacgacccagtaattcatgaatgttttctcgatccatttgttaaacggaagtgccacgatgattgccggcacacaagataccagaatctttaaccacagcacgatcttattcatgttgatgtatttgtctgcaaatttctgtaatttcccgatacgctcattcgtactgatatagttccagttactctctctggacggatcatttttatgaaatggccataattttttaaaatccagtaccacaaccgccagtacggctcccagctggatgaccacaaggaacatctgccagaattcctcactgactttcagtttcataaactgatccaccaggatcatatggccggtactgcttacaggaagccattcggtgattccctccacaataccgagaaaaattactttcagtaattcgataatatccatattttcccctttatttagatctgtgcgatatcaatcagcgtaagcttgttcaaatctgtattttccagactggttaccagtgctttggctgtatccatagcggtcagaacgttaacacctgtctcgatagcatttcttcgaatcaggaaaccgtcttttgcgtgttccacaccctgagaaggtgtatcgatgaccagatcgatcttgtgacccaaaatcaggtccatcaggtttggtgacggctgttcgagcttattggtacggattgcttttacgccggcttcctgcagcgttttagctgtatttctggttgcatagatccggtaacccagtgcttcaaaccgttttccgatctcaactgcttcctctttatcctcatcacgaacggtcatgatcatatttttatgtttcggcagattgatacctgcgccaaggaatgctttgtacagtgcttcgttgaagctttctgcgatacccaggcactcaccggtggacttcatctccggtccaagactgatatccgcaccacggatcttctcgaaggagaataccggcatcttgatcgcaaaatattttgcttccggctgcagtcccggtgtataacccatatctttcagtttgtatcccatgatggcttttgctgccagaggaacgatcgggataccggttaccttgctgatgtacggaacggtacggctggaacgtggattaacctcgatgacatagacttcttcaccgcatacgataaactgaatattgatcataccgatgacatgcagtgctttggccagacgtttggtgtattcttcgatggtagcttttgcagtcttgctgatggtctgtgccggatatacagagatactgtctccggagtggatacctgctctctcgatatgctccatgatacccgggatcacgatgtcttcaccgtcgcataccgcatcaacctcgatctctttacctaccaggtatttgtcgaccaggatcggatgttcctgtgcgatccggttgatgataccgatatactgttccacatcttcatcgttgatcgcgatctgcataccctgaccacccagaacgtaagaagggcgaaccagaaccggataacccagttcgttggcagctttcttagcctcttcagcggtaaatacggtctgtccctttggtctcgggatctggcactgttccaggatctcatcaaacagctcacggtcttcggctgcatctacattttctgcggatgttccgaggatcggcacacccatcttcatcagtgcctcggtaagtttgatagcggtctgtccaccgaactgcaccactgctccgtccggtttctcgatatttacgatgttttccacatcctccggtgtcagcggctcaaaatacagtttgtcagcgatatcaaagtctgtacttacagtttccgggttgttattaataatgatggtctcataaccttcatttgcaaaggcccaggtacagtgtacggagcagaaatcgaactcgataccctgtccgatacggatcggaccggaaccaagtaccaggacttttttcttgtccggtgtacgttctgcttcattttctccgccatatacagagtaataatacggtgtggtggctgcaaactcagcggcacaggtatctaccatcttgtaagctgcggtgataccgtatgttttacgcatttcttttaccgtttcttctgtctttccgttcagttttgcaatcacataatccggaaattccatgcgttttgcttctctcaacagatcttcgtccagttctctggtcttcaacgcatattccatctcggtcaggatcgcgatcttatcgataaaccaaagatcgatcttggtgatctcatggatctcctcctgagaaattccgatacggatcgcctgtgcaattctccagattctcatatcatctacaatatgaagagcttccaacatctcttctctggacagattggaaaaatcgtaggacatcaggctgtctacatgctgttccagggaacgaatggctttcatcaacgcaccttcaaagttattgcagatactcataacttcaccggtggctttcatctgtgtggtcagggtacgttttgcactgataaatttatcaaatggcagacgcgggatcttgacaacgcagtagtctaacatcggctcgaaacttgcataagtttttccggtaatagcattcgggatctcatccaaggtatagcccagagcgatctttgcagctacttttgcgatcgggtatccggttgccttacttgccagtgcggaagaacgggatactcgcggatttacctcgatgacacagtattcgaagctgtccggattcagcgcatactgtacgttacatccaccggtgatgcccagctctgtgataatattcagtgcggaagttctcagcatctgatattctttatcccccagtgtctgcgacggtgccacaacgatactgtcaccggtatgtacaccaaccggatccaggttttccatattacaaacggtgatgcagtttcctgcgccgtcacgcgttacttcgtactcgatttctttccatccggcgatacatctttctaccagaacctcgcccacacgggaaagacgcagaccattttccaggatctcgatcagttccgcttcgttatgagcgataccaccgccgcttccacccagcgtataagccggacgaagaacaaccggataaccgatggtattggtaaatgcaataccgtcctctacggttgtaaccaccagggaagccgcaaccggttcaccgattttttccatggtatctttgaattcctgacggtcttctgcttttttaattgtctgggaagtagtaccgatcagtcttacattatgttcttttaagaatcctctctcttccagttccatcgccaggttcagtcctgcctgaccacccagtgtcggaagtacgctgtccggtttttctttcaggatcagctgctccacaacttctacagtcagcggctcgatataaactttatcagcgatatctttatcggtcatgatggttgccgggttagagtttaacaggacaacttccacgccctcttctttcagagaacggcaggcctgtgttcccgcatagtcaaattctgctgcctggccgatgacaatcggacctgagccaatcatcagtacttttttaatctctggattttttggcattactcttctcctcccatcattttgataaaccggtcaaacagataaccggaatcctgtggtcccgggcatgcttccggatgaaactgtactgtaaaaatattttttcctgtatatttcagtccttcgttggttccgtcgttgacattgataaatgccggaacggcaactttcggatccagattgtcggtgtctaccacatatccgtggttctgagaagagatatacactcttccggtttccagatcttttaccggatgattgcctcctctgtgaccgtatttcatcttatgggtatccgcaccggttgccagtgccatcagctgatgtcccagacagattgcaaagatcggtgtgtcggattcatataatttacggatctctttgatcacttccgtacactccttcgggtctccagggccgttggagagcatgataccgtccgggtttgcagccaggatctcttctgctgtggtggatgccggataaatggttacctcgcatcctctctgattcagagattttgcgatattgttttttgcacccagatccagaagggctactttctttccgctgcctttcagcacggtcttttcggagcaggttactttctccactacttttcctgtagtatatgctttcagtctcggaatgatagcatccagatcataattttcatccgttgtgatcataccattcatggttcctttttctctcaggattctggtcagagcgcgggtatcgatccctgcgattcccggaatgtcaaatcgtttcagaaagttctgaattgtatcttcacaccggaaattgcttggtgttctggaaagttctcttacaatatatccatccggccatggtctcaaagactccgtatcctcatagcaaataccgtaattgccgatcagcggataagtcatacatacagcctgtcctgcgtaagacgggtctgtcagtacttccagataacctgtcatggaagtattgaacacgatctcgctgatgacttcttttttggctccaatgctggttccggtaaatacatgtccatcttcaagtattaaaaaagctttcatcattccgtttcctttcttttttcttatgtaggctgtttacagcctgtttatatctttttccgcataaaaagggagaaatttcccgtgaaatcactcccccttgcgtaatcttagaaattttaccacaaagtctttttcatttcaatactctattttagaaaagtgtcgctttctgcgggagaaatattttttaatctttttttataaaaaagtattgacacttcgtgttttatactgtatagtatcacttgtcgctgacgaagcggcaaacaatttcataattaaaagttgtgcaggaatggcggaattggcagacgcgcaggcttcaggtgcctgtggtagcaatatcgtgcgggttcaagtcccgcttcctgcactatttttttatgcagctctgttctctcatgtttctatctatcttacccttcccttggtccagataatacaacttttcacacaatatcctttccggattcctgtccacgtattcctaacataaattgtcttttttatcagaaaagtgttgacaacttcaacaatttcatgtatagtatattttgtcgataagacatacagaatttcataattaaaagttgtgcaggaatggcggaattggcagacgcgcaggcttcaggtgcctgtggtagcaatatcgtgcgggttcaagtcccgcttcctgcactatttttttcttctattttatcaaaacccatttggcattgtcactcttcaggctgtatccacaaaaggagcagcaatgattttcatctggtacaaagttggctccacaggatggacattctttctccatgaagaaaacgccgtcttctcttcttctttccgggtaacgggctctttgcatgataagtgttcgcttcacttttttcgtatatggatttcttctatctggcaaataggtctcgcttgcacagacttttacttttatttttgtaatatcttctgtgttgaccactttctttaacgtgatatttccgattccataatccatcagttcatccgattctgtttcgttataaatggcatcaccgatacaggacctgagataattctccgagtatcttactatggagtccgccatcttttcctgtctgtttcggaaaaactgattggataccaggatcagcacaaaaaccagaagagctgcaccaacaccggctgtcagggaaacttctgtatcctcgatcatatacaggcacaaaaatacgcagacatacacgattcccatagcccctgtcaaaagcaatgcacgccgaagatttgttcctattcgctcatatacctcaaatctttccgtctgccagtcataaaactcgcttcggatcacacctccgcagtactcacagaccacctgctgaccggtcagttccaccgacgctccacaggatggacagatgattttctgtacggtggaataataactttttttcttctggacacgatctgagtttcggatatgccgagactgaaggatccgaagataggtatgttttcgataattctcataacggattttcccatcttcagtggaaatcagacgttccagagcactgcacttgataatagattctctccattctcgtccatcattgttccagcgttcaaaatcattgtccggctgagtttccacgtctgtcatcagaatctcacggcacagcttctgctgattcagtcgatcaatctgtcttacgatatttttccgaaaagtcatatccattcttgagggaagtctgtttttatccgctttttcaaggggaatcaagattctctcgaaggctttccttatatcacggcgtatccctgacttttgaagagtggtatcgccgcgttgttccatcattctttttattttcccctttttccggttttttgccagaaaaacagaaaaatcgatatccagtatccgttcaccgatataaatccctaacaaaatggcaactgttgcagcaaaccacgatgcatctgatagtcccatatgtcgcctcccatttcatgttatctatttctatttttatccttatttttctttttttctgattcttcaccgttttccggttctttcttgaacatctcggctatgaagatcgctgcaaaacctgccccaaggataatagctacacagcagaacaagaattccaggggatctctgtccggcgcaatcttatattttccttttgacgttctgtaaacttccacgtcgatctcgtcccctgtattgatctcctcatcgttccagcagtatacggtgtctctgtcttggtaggtttctccatcgatctcaaaagtgactttcactctgtattcccgtaattctctttcacgatgatatccatcctcatccttgtctttatttacgacttctctgcaatatccgacaacagccgaaacctcccgaatatccgtactgtttttatactcatggcttgctatccggcttgagaccacaccataaattcctgcaccacacacaacaagtcccaccagaatacccaatagaataatttttatatctttcttcttaccattttttacactactcatcgctatccctccttccattctttatatactctctgaatctttatcatgtcggtttctcgaaacatcatccataggtcctgatagcctccagaagctgtgtatcattctgattggacggcatgctggcgttttctgtctcattttccagaagcagtcccgagccgctgtatacagaatatacacagaatgtttctgaccagctaaccggatcttcacccttctgataccattcgccaccggttcgtgtcgcctccattgtcagatacgttctccccttctcctgggaacagctccaggttccttcataagcctctgtttctgtatcatcatagtcctcttcgtccacgccatattctctttcacaccaggaaatatgtaatttcccaccttttcggaattccagaaaatagtttccataactattcgtacttcccatcgctatctgaagttcccagctagtgtctgccagatctttttctttcagctccatactgacatctccataccatcctccaaatctgctggctccgcaggcggcataatccgtaaaatccttagcctgggactcatctgactcggtgacagggattgccacgcgtccaagcatatccatcatgggataccagtctgcctggtagccggcttctgttcccatggagatcatagccgtagcatatcctcccactccgttacacatcacaagatatggttctcccgtctcggaggaatacagctgccctacttcatccatctcaaaagtctcaaagttcatcctctgttctatgatctccaccggatcatcaccgcttctcggaacaacgcaaaacagctgtccgatttcgtttccaatgattctttcttcaggaatcatctttacaaatggatatttctccgaaaaatccgggaaattttcttcgatccattccggtatccggtctgcataggattcatccacttctccaagaaaggccactccaaagttctgaagggttccttccatgctctggcggaaagcttccagagacttctctgctttctgttcttctgtctcttctttcttttccggttttggagcagtctccggttcttccggctgttccggttcctctgtagtggaactgtcttttatttccggttttccggccttgttggctttgatgggaaccggttcggcatccccattctccggaagttctccatccgccgtccttccatttaccatgccgtctccgtctttcttgtcaatacatccggtaaatatggtcagcgatgtaatgcagagcattcctgtaagaagggctctgagcaatatatttttatttttcacacatgtttccccctttataaaagatttcgagcgcacctaagatagatcgggagggatgaaccctcccgatgtactgcgaacagattgcccatgtggtaatctgttattctttattgtaaccgttcagtaccttcacagttacgattcaaaattcatttaaaatcaccttcggtgatgggattttggtgtattcataccaaaacacctcgcgggacagtggctactgaatagttactctttatttatcaaagcttcataggtgtgggacatcaggaactgccccggatcatcctcggtcatattttccatgatattctttaagctttcttttgaagcatcgtctccacgctccatgatatatttcattgcgatttctcttcctcttctgtctgcatcctgatccgctacgatatccagcatcaggttattaatttctgcctcgtcaaaataggtggcttctttcttccaatcttcataactggtgcccatgctggaagcacttctgaatgcgccaaccgttgtccaatatggaatatctccgttgcgtggcttctgtgacagataatctatcgttatgcgatatgccctttcattggtatatctatggcttgggtaatcataccacatataggtcagggaagtgatgcacgcatcgtggaaccgaaccagactgctgtccttcagaacttcctccagcggatcgatcacccggtcatcgtggagtcttccggcatacttatatgcacacgttcttacttcctcatcctcatcccccatcagtttgagaatggcatctaccatgccgtcaatacccatagcccattcagatcctatagcaagggctgcctgtttccggacattggcattctcgtgctcggtcatattcaaaacgaactctgcaaccgccggattgctcacggcacctccaagacttcttaaagcggcaaataatactacaggttctgtttccttggccagtacttcttctgccatcttttcttcctcactgcttgtgccaaacaggcctccgatcgtggtgaatgcataggcgcgaacgttggcattttcactgtggagcatgttatccctgattgttgtggtatatggaatcttacagccatcatccttgaggattttgaaagcctcatcggtaatattttcttctctgctataaaagtcttctgtatagtttgtataagcatatgtagaatagagtgccagtgcttcgtcttctgtgatatttttcacgtctttgatacgatctatcagatcctgagcagacatactttcatattcttttttcgtaacctgtgccggttcataatcatcgtccgagaaatctgtttcgttctcggtatccgtgtctttatctgattctttggtttctttgtcctcctttggtaccggtgtttttggcggagcatccgtttcggcagaatcgtctccgatatctgtcgtttctactcctgaagttgtatctttatccttgtttccgtcctttccacagcctataggcatcgccagcatagctgcgaccagcagcatgctaataacttttttccacatcataaagcttcctcccttcatttctgcaaaactttttctatgattgaccttaccttctctataattatattaaacaatataaaaacagttttcactattacttgtgttagttaccgatatttgtttgtctgtttcctgtcagaaaatgtttttacagttaatttccgcgaatcgtcagaatacattattcaattacgcatttcataaaagttctctattttctatatttttctattttttttcaaaaaagctgttgacaaccagtgttttttcatgtatagtacattatgttgttgagatgcaacaaaacttcataataaaagttgtgcaggaatggcggaattggcagacgcgcaggcttcaggtgcctgtggtagcaatatcgtgcgggttcaagtcccgcttcctgcactatttttttgtctttgtacaggctgacttctgttctatatttattttctgcaatcgcaaaaagatcgctgcattcacgtttttctgtaaacacagcgaccttttctttcatctcttattataactgttcaataccctcacagtttccttttatttttcaagcacaaatgcttcatacgggcgaatcgtcatctgttctttgatttctccttccggatagtttgcgatcagataacttcccttgcggaattcctccggaatctctactgctacttctttttcactgaagttacataccaccaacagtttttcctctcccagtgttcttgtatacatatagatttcttcggattccggcaataacagatcataagttccgtatacgatgatctctttttcttttcgcagtgcgatcagctttctgtaataattaaatacagattccggatcgtcgacctgtttcttcgcattgatctctttatagttcggattgaccataatccatggttctacagtggaaaatcctgcataagcactgtcatcccactggaacggtgttctcgcattgtcgcggctcttacggcacagataacgcatcatttcttccgcggtaaatacatgctgctcttctaccagttctctgtaagcattgatgctgtccagatcacggaactgatcgatcgatgtgaacggaacgttcgtcatgccaagttcttctccctgatatacataaggagttccctgcatcatgtgaatacaagttgccagcatctttgcagatacatcatgatattttgcggaatcatcggcatatctggataccgaacgtggctgatcgtgattctcccagaacagactgttccaggcaatatcctccagacctttctgccatttggtcagaacagctttcatctcgcgcagatccatctttttatcggtccatttgttatccgcatcagcatccacatccatgtgttcaaactggaataccatattcagctctttttcatcgcttcttgcgtattttttagcttcttccagagtcacaccggaacactcgcctacggtaatggtatccgcattgtttaatactttttcacgcatctcctgcagatattcatggacatgaggaccgtttgccggctcattaaagcttgcgtatccattgattcccggctttccatccggcagatccggctgtttggaaatcaggctgataacatccatacggaatccatctactcctttttccagccaccagttcatcatgtcaaatacttcttctcggacttttggattatcccagttcagatccggctgttttttcgaaaacagatgcagataatacatatccgtttcttcatcataatcccatgccggcccggagaaacaggagccccagttattcggttcctttccatcttttccatctctccagatataatagtcgcgatatggattgtctttagactttctgctctctataaaccatggatgttcatcggaggtatggttgactaccagatccatgacgattttaattccatgctcatgtgctgctgccagcatccggtcaaaatcttccatggttccgaactcggtcatgatcgcacgataatcgctgatatcgtatccattatcatcattcggagactggtataccggtgataaccatacgacattcactcccagttttttcagataatccatcttttctgtgataccgttcagatcaccgattccatctccgttgctgtccttaaaacttctcggataaatctgatatacgatactttctttccaccatcttttttccatagttttatctctcccttttacatttatcattttgtgtttttgccaaacaccagatactctcatcataaccgaaaaaagggcgaaaaacttccgtttttctcccctttttctatactattctgacttttcatgttcaccgattcttcggatcacttccgttaccagcacacgaaatttcggtgcggcaagatcggcggcttcctgcacctctttgtgggacagcggctgtgtactcatgccggctgccagattcgaaataaaggaaattcctaggatcttcattcccatatggttggctgcgacagcttcacacgcggtactcattcccactgcatctgcccccagtgtccgtaccatgcggatctctgccggagactcatacgccggaccggtaaactgcagatacgttccttcctgaagatcaatgttcaacgctttgctgctctcccggatgatcttccggtactccctccggtaaatctcactcatatccggaaaacgcggtcccagatcttctctgttggctccgatcagcggagacggtacaaaacttgaaatctgatcggtgatcatcatcagatccccggcatggaagttctcattgacaccaccggctgcattggtcagaaacaggatctctgcacccattttcttcataagacgtaccggaagtaccacatcctgcatcggatagccttcataatagtgtacccgtccctgcatcataacagtcggtacaccttctacctttgcaaatacgaactgccctttatgtccggctaccgtagaccgtggaaatccttcgatgctctcatatggaatggttttttccactgttacatgttctgcataatcccccagaccggatccgaggatcagcgccagtttcggtacaaatgggagctgatctttcactgcctcataacactgatccagtttttcttcactcttcatcgccgtcctccttctgtgcgcaggcatcccatacttcctgctctgcatcctgttccggcgctgtttcttcttttgtttcttcctggggttcttcggtttcttcttcaacttctgtttccggctcttcgccttctttctcttcctggtcttccgtctcctctaccggtccctgggtaaaccattcctcttctttttcttctttttcttcctcttctcccagaagttccgtaccgcagtacatgcagaatacggcatctttcggattggagattccacaggcagggcatacattttttccctgttttgcagccatgctctctttacactctgccaattctttctgcagacccatcaccacttcacagtgaccggtcagttcttcatccatggtatctccgtctacatagcgcttatacacaatttcaccgacatccgcatattttttccgtatctctctttgcagtgtccgcactttgtttcgcatcttctgtgtctcaacaaattcttctgttttctttcctacagcccctgctgtttctgtaatcgtctgtttaatgctaccaaataaatcttcgttcataagtcatacctccttgaatataaaaccccatttgtatccgttttactgcaacaacagcggctcctgtcctcttaaaaggatcttcggaccaccggtgtgttcaatatattctttggtgatgagcacctctccaatactgtcgtcctttggaatctcgtacataatatccagcatgtattcttccagaatcgctcgcagtgctctcgcaccggtatctttttccagtgctttttttgcgattgcacgcagcgcattttcttcaaattccagtttgacttcgtccatctccagtagtttctcatactgtttcaggattgcattgcgtggctctttcaggatcttcaccagcatgtcttcatcgagtccctgcaatgtgaaaatgatcggcagtcttccaagaaattccggtaccataccgaacattctcagatcctccaccgttaccttattcaacagatttttatcattgtcatatttatctttcagatccgcctgaaaaccaattgctgcctttttgtttaaccgttctttgatgatttcctccagatccgggaatgcaccgccacagataaataaaatattgctggtatttactgtagtcagtggtaccatggcatttttactgttcgctcccaccggcacttccacatcactgccctcgagaagctttaacatcccctgctgtactgcctcaccactgacatctctctggttcgtattcttcttttttgcaatcttatcgatctcatcgataaagataattccatgctctgcccgctccacatcattgtctgctgccgcaagtaatttggaaactacgctttcgatatcatcaccgatataacctgcttccgtcagcgaagtcgcatccgtgatcgcaagtggcacatccagcagtttcgccagcgtctgcaccagataagtcttaccacttccggtcggcccgatcatcaacatattggactttgcaatctctacttcaccatttttctgctctgcgctgagtactcgtttatagtgattgtacacaccaaccgaaatcacctttttcgcatgttcctgaccgatcacatattcatccagtttttctttgatcttatgtggcggcggaacatccttcatggtaaattcctgcttcttttcttccgttttctttttcttcttcactctctgtttctctgatacctgattcggaatactcgacagatccatcatgctgatattgggcatgtggctcatcagatccccgtaattcatattgctgttattcatggtatcaaaacttttctgcatacattccgtacaaatatgtatattctgaggaagcgtgatcatcggtcctgtcttgctctccggtctccgacacataaaacagactttttcgtattcatcttccttcgtattttcatcagaagtctctcgcccctgcttttctttttccaataaatccttgtcttctgacatccgttcatccctttctcatcccacattttatgagacactgtccccgaaaccacctgtcactcctgtgtacttccggttacttaccctatattataaaacagaatcttcttgccctcaagtaaactttttctaaacacagctttcagcatactgtctccccctattttccttctgttctccccctctgaataagttctatcccttcattccttttatttcctgccattcccaccatatttcaactttctcccaccgttaacgcacagcggcaggggttcccgccagggtccggcaacactttatgggcgtttagagcaagctttaagatccagtccttagaagaacttgacagtgagcggctctccgcgaactggcatttagttcttcttaggacttagcttaaagttgctctgcccacgttgccggactctgacaggaacccctgccgcgtccgtctatgatactacttattcacttacttaccctgctggggatccgcctgcttcatctcactcttctttccaagagtaaccgaaaccgtctgctcctgatactccccgttctgtgcccggctgatcacaacctccacagtctctcctgcctgataatactccagttttccacccagatccgaactaccggaaaccgtcataccgtcaaatttgacaatcacgtcacctttctggatacctgctgtctgtgccggtccgccctcttccacagaatctacaaaggcacccagtgggataccgtaagtctgtgcagaagtagaatctacattcagacaagtcacaccgatataacccgcatgatcttcatccgccttatatcttgtctcgcggttcatcagttcatccaggattggctgtgccacagataccggaatcgcataacccattccttctacttcggtggctgccgctttcgcagagttgataccaatcagttctccctgcatattcagcagtgccccaccgctgttgccgggattgattgctgcatctgtctggatcagtttcccggttgtctttccgtcttcgtcggttacttcacgatccaccgcactgatccatccggaagttacggactgtccatatcccagtgcattaccaatggcaactacctgttccccgatttccagctcatcggaattgccgatgcttactactttaatggatttcagagtatcttcactcatatccgaaattttcacagcgactaccgccagatcgttgtcggaatccgttcccttgacctgagcttcatacaccgcatcatcatcaaaagcgaccgtaatagtatctgcatcagctactacatgattattcgttgctaccaggatctcactgtcattctgtcctacaatgataccggaaccggaactctcactcgggtactgctgcacgccgccaaagaaatcctgtaccgtttttacagacgcattcgtaatagatacaacagacggcatacaactttttgccacctgtgcaacggtgtattctcccgttgtgcctgcgcttacttcctccgttgcatcacttccgcttcctgctgcactgttactgtccccgtcagcattctcctgctgcggcagttccgtggtcggaagctgatactctgttttctgctcatttttaatttctttatgcacgatcatactggatccgatgatgataccgcctgcaactacaccaaaaagtaccgccagaccaagcgttactattactttttttcctgttccgcccggttttctgtggtcctgtggttgattcggatcctgctgtggctggtaatacgtataatttccatactttctctgaccggtcaccggaccgttctgcgtactctgttcccggctcgtccaggaattcccactctgatacgctccgccattttgtgtattctggttattctgactgtttcccgcacaaccccagttaccattctgatagcccccggttgtctgtccggaagaactgctgtcttccatctcttttgttgtatgatttccaccgaccggctgtccccagcctccgttatcctctgattcggctgctgtctctgtgtaattttgtgtatccgccgtcccgctgacatcctcccggtaattctgattctcatacgtattctggctggcacgttctccgccgtccgctccgttctggcatttctgataatccggatttacccagtgataagaagctgcttcccgcgaattctccggctgtgcaccactctgctgcaccggctgttcctgtggttgtaccggagtatccgtcacatccgccggctgttctttcttctcctttgtccccagcactgcttcccacggatatctcggtttttcttcctctgtttttgcaacctgcccgtcaccgtttgtcgctgcttcttccgtcgtttctgtcacttccacccgctcccatacttcaggctcctgactttctgtcgcctccggcattgcttctgcggtttcccctgcttccggttcttttacagctgtcgcctctgtcacttcagattcttcaccgaccggctgctgattttcttcctgttctgttcccggcattttccattcatcattcatcgtttttctccctgtcctttatatgtcttcacattctttttcacgttttgtgtatctgtttatcatatccgaaaattgtgttaaaactgtgaactttcccgcttattcccaatatttcggattcatcgtacagcgagggatcacccactttggaagcttctgatatctctttcccagaagatagcccagatatttccagccgctctgccataccagctggatcaccatccatggttttccctgtctgcagaaccatccggcggtttttttcaccagacggatcccctctccttccgattggattccggcaaaaacttccggatggtctgcctgtgaaaccgccagatcaaagttccggtgaaactgctggattgccgaataattgtgggaatgtaccacctttgcctctgccgcataagccactccatatcccttttggatcagttctcctgcaaagatcatatcttcattaaaaatggccttctgtacaaaaccacccaactgcagatacagctcccgtctgtacattgcacacacattggaacaaaaatacgtcttgataccgagttccggcaggtctgccagccatttcactcggctttcctccggataattaaactttctcgtatactgttccatcagccggcagtcctcccgtggcagctgtctggcataggcagctccgattttttcatcccgttccatcgcctccaccagcttttcgatcagatggcagtcttccggcaatgcatcctgagtcataaacagcagataatctgcccggctcatccgcgccgcctgatcccttgtctttccatgatcgaattcctctctggtcagatggtgcacttccatcggaatcgtcgttttctcataagctgctttccagttttcctttcctgtattcatcacgatcaggcggtgtaccggccaggtctgtccttccagtccgcgcagcatctgtttccatccttctcccggacgataagccgggataatcacatctaccgttttcttttccataatctgctccattttctatatatgtgaaaagaactgtcgcacttttcacgacagttctttattttccattttttcttcttactccgtatcactctcacgataagctgcaagggagccatcttccgaatgatccagtcttgactcttctccaaatccgctcttatccacaattcgctggctatatgccttcacttcttcggaaggtgtataactgtcttccggatacaggaattcatgcagtttgatcacatttgattccaatgtgaccggaagtactacatcaattccaaccgcatctttcacacgctgtccatacagatgatcaaatggaaaaccagtttgatcttcaatatcataggataacatactcattcccatctgcagaatttctgcttttgaaaaagatgtatagatatttggaaatactttatctagaattttactcaatgtagcgacatctgcatttttcgctttctctacgattttatagataacttctctctgtcttgccgcacgacggaaatcatttcctgctgtatatctgattcgtgcatatgctactgtctgcacaccattcagatgatgtacgcctgctgtttttttaagtggtgtataatccatacctgttacttttgatgtttccacacagtaattattcagatgaaccacttcttcttctttcagttccacatcaattccgccaagcagttccacggcttccgcaactgcctgaaaatctacgcttacaaaatccgtcacattcagatccagattggtattgagcatattcaggaactgttcggcgccgccttttgcatatgcagcattcgctctgttatactgaccatttccttccgaatcttcgccaatccgcagatatgtatcacgatatacggaaaccagtttcactttcttggtatcattgtcgatacttgcaataatcatagtatcactgttaccggattttaatttattactgcgattatccagaccaaccaggccgatggtcgtataccctttcataactttattattgctgacgccggaattaactccgatcttactgaaatcaagactcgtaaaattcatcttgccaagttttgcatatataaaaacccctgcaataagaatcagcagaataaaaatttcgattccgaaaagaattcttcttcgtcttcttttctttaataatctcttctgttttctggtcaacggctgttttttagacataggtttccctccctctttcgtatcccctgaggtttactgttccagggaagaatcatcatatccctgtgtatcatctgttacatctgtctggctttcttcctgcgaatctgcagagttctctgccggattcgcagactctgtatctgattcatgataagctgccagtgaaccatcctccgaatgatccagtctggattcttctccaaatccactgatttctataattttctgactgtatgttttcacctcatccgaaggaacataactgtcttccggatacagaaattcatgcagtttgattacattagattccaaagtaatcggaagtacacagtcaagcccgtccattgcgtcttctactacccctccatataaatgatcaaatgggaaacctgtctgatcttcaatatcataggagagcatactcattcccatctgcaaaatctccggtttcgtcagcgaggttttgatcagtgggaacactttatccagaactttgctaagagtactgatactggaattctttgccttttctacgatcttatatataacctctctctgtcttgccgcacgtctgaaatcgtttcccgctgtataacgaattcgcgcatacgctacagtctgtactccgttcagatgatgaactccggcaacctttttcagtggtgtataatccataccggtaacttctgacgtctctacacaataattgttcagatgttcaatctcctcttctttcagatcaacatcgataccgccaagcagttccaccgcctctgcaacacctttaaaatcaaccgttacatagtcaacaatgttaagatcaagattcttattcatcatggtcatcattttttccggaccacctgtacagaacgcagaatttgccttattgtatacattttcgccgtccgaattacttccaacccgaagatacgtatcacggtatatagaaaccagttttacctttttggtatcgttattgatactcgcaatgatcatcgtatcactgttgacatcaccatccagttctccttctctgctgtcaagtccaaccagtgcaatacttgtataacctttcataacctgattttcttccacactttgattaacatccacattttcaaaattcaggtcttcataattcatatttccgagtttcgcatatacaaacagtccgcccatcagaacgaccagaatgataatttccagcgcaaacactactctgctcatcgtacttttccggcgtctgcgtcggattcttttctgtctgtccgtcaggtttttctttttcgccatgtatttactccttattcctttgttttcctctcttgcagaccctcttcctaatatgcgttcttgttaataaagcctttaaaaaacgtcagcaaaataatttttacatccagtccgacagaccagttttcaatataatacagatcataatctattcgtttccgaatggatgtatttcctctgtagccattgacctgcgcccagccggtaagacccggacgtacctgatgttttaccatatatctcgggatctcttcccggaatttttccacaaaaaacggccgttccggtctcggtcccaccagactcatatctcctttgagaatgttaaacagctgtggcagctcatcgatactcgtccgtcgcatcagctttccgattccggttacccttggatcgtttttgacggtccatgccttcttttcactttccttcgactgtacttccattgaacggaacttatacatcataaatgtatgattatgcagtcccacccgctcctgtttgtatatcagcggtcccggagaagtcagcttgatcatgatcacagcaaacaacattatcggagaaaacagaataattgcaacgatcgatccgaaaatatccattagccgttttaccaccgcattgaacgtattggtcagcggcacataacggatattgatgaccggaagtcccagtaaatcttctgtatatggttttgtcggaatgatattattgtaatcaggaataaacttcgtgtgtactcctgacttttcacacattgccacaatttcctgcagccggtaatattcactcagtcccaaagtgattgcaatctcgtccagcctgttttccggcaggatcaccatcagatttgcgattcttccaagcactttaattccgcggtacatagttccggcttctacattatcatcgaggattccacggatctgatatccccactgtggattttcaagtatccggtcaatatatgcttctgctgccttactgtaaccaaccaacaggatatgcttctgattcagacctcgtttacggatatcccgcaacagataacgaatcgtgatacggaccaattcttccaggaacatatttataaaatagaagaaaaacaacatatcacgggaaaagttgatttctttgagccacacataaatgcacccgataatcaacaatattcccaccgtattggcttttacaatattagaaaattccagtctgcgtccctgcacccgtttcggtgtatacagattaaacgcataatacaggatcagataaaccggtacgattccaaccagcgctgtcatataccattcaaaagataaacttctgaccgcatctactgaaaagggacccacgaattttaatgtccatgccagcagataagaaacaatgatcacaacagcatcaatcactacatgcatacgattaaagtacttctgattatctttaatcaatatttttcaccttttagtatttctggtatgttttgtatttaccatattactataatacgcaatatacaaaaccacaaccaaacattttgttaattagcttacacttttcttacatattatagtcaggatatattttcctgtcaacaaaacttacgttctccaatgtttctttcagccaaatcgttactgttcactccgtgcctagcaacacgctgcgcgatgcacagaatttaagctaatcgcataaattcgcgggatattaccagtgaacagtaacgtcaaatctccgtatcacattgatccacaactgcaattgaatcttccagtaattaggaagatttttccaaaaaaacggtacttttttatcttttttacacagtgaaaaaccatttttaatccctgctgcatattcccgcccatatttctttgaagcaaagaatataagtttcacagtgaatcccaacaccagaaaaggcagattcagtaaaatctggagcaatggcatatttttataaagcatataaacattatttctggaagaatatctgattttaaactgattatagcgtgatcctgaagttccgcttcccacgtgatacacccctgctttcggcaaataccagttttcataccctgctatctgtgcccgatatccaagatcaatatcctcaagatacgcaaaatgttcctcatcaaatcctcccagctgctttaccagttctgtccgataaatagcagctccgccacaggaagcaaatattttccgctcttttctgtatttttcttccggttttcccttcccaagcgcaaacgcccagccaagacagttataataatttccggcatcgtctatctttccccgatcatgaaactgcagcattcgagcagctgcagaaaaagcatcctttttcctttcaattccccgatacagttccagcagaaaatcgggctctgcctcggtatcattatttaacagtactacatatggtgtctgtgttgcttcaattccgatattcactgctttacaaaaaccagtattttccgcaagtgcaattacccgtacccatggatatttttcttctgtcagttctctgctcccatctacggaaccattgtccacaaatatcacatcgaattcagaaaaagtctgtcgtttcaaactgtccagacaacgttctacatactgtatcccattaaaattaggaatcacaacagttatcttcttcatggtatctccttccttacgtacgcagcgaataattccatttgctcaacgtaaggtttttattataataaggatctccctgctttaacaaatcgatccatctggtccgcataaattctatctcctgctggaaccggcgcactttgtcttcactgtcctccgatcccctggatttggattcgtaatgatataattccaccctcggattatagaccacaagatatcctgctctcacgcaccgcaggcaaagatccacgtcgttaaacgccactgtcagtgcttcttcaaatccatccagactttcaaaaacagttcgcttcatcatcatacatgcggcagtcactgcgctcagatccatctgcaaagatgctttgtgaagatacccacttctcgaacgtggcatatttaagaatgcatgaccggcgatcccgccgattccgatgattgttccagcatgctggatcgtatcgtccgggtaatacagttttgctcccacgatacccacttctttccgttggcagttccccagcatttcttccatccagtgaggattgatcacttccacatcattattcaaaaacagcagatactctccggaagccgatttttctccgaaattattgatggctgaataattaaatccggattcccagatcacaatttttacgttattccgttttttcagttcttcataatattcccaggtttctttctcctggctgttattttctatgatgattacttcgtaattgcaatatgtagttttggaaaataccgaatccagacactgtttcaacgtatctttctgatctttattcgggatcaggacagacaccagcggggttccctgcaccggatattccacctgatagaaaccaagatctttcgtatgactcacggttccctccacaccctgtcgtttcagatgtgcttcaatagccctctttcccgcctcaaacgcatacatcttgcttgccggattatccgccgtggatgcctgatgcgtccgccagtgatacagcacctccgggatatggcagatcttcttcgcagcctccgtacaacggaagatgaaatcataatcctgtgccccgtcatactctctgcgaaacccgcccacctgacgaatcagactggttctcaccacgaagaaatgtgtaatataattattggatctcaacagatccacattaaaatccggtttgaaatgcggctgaaaatgttcgctcagatctgtagtcactttatcttcatccgaataaaaaacatccggctcttctgaactctgattcagtgcttccacgatccggtacagtgcctgtggtgccagcagatcgtcatggtcaagcagaccggtatattctccggctgccatctccatcgctgcattcgtattttccgcgattccgagattttctttcagattctccacttttactctggcatctttcgaggtgtattcccggagtacttccgacatcgctgcatcctcggggcttgcattggcgatacacagttcccagtttgtatatgtctgcacctccagtgattctatcatttcccgcaggaatttcgccgatgttttatatgccggaacaaccacactgatcagtggctgttttttccactgtttccttctttgcccttccagttctttttccgaaggtttgtgattctcaaaccatggaccataaggcacttcttccggctccatccgctcacacagacgcacccagaactctttcggtccgtaatgtttcagatagcggattcccttttttatcgtatacggttttatctttttgagataacgcatccagtttcctgaactcatcgatactcctttctgttgcctcttatctgctttcgtaactgtccagtgtcttcccggttaacagtttctgccctctgaatagctacctgtcttctatcgtctcatactccggaaattctttcagcgcttttaccacttccgctgcttcttccagggacagactgtagtacatcggcaaacgacacagccgttcgctctcttttgtcgtgtaaacatcctcgccatggaaccgtccaaacttctttccggctgttgcagagtgcagtggaacataatggaaaacactcaggatcccacgctctttcagataagccagaagctttgtacgcaccctcagatcttttactttgatgtaatacatgtgggcattgtgtgtggcatactccggaatatacgggcgttccagcacccctttgtcttccagttctttcagttcttcgtgatagaagttccagatggacaatctcttatcattgatcttgtctgcctcttccagctgcgcccacagataagcggcattcatatcgcttggcagataggacgatccatagcccacccaggtatatttatcaatctgtccacggaaatactggctgcggtttgttcccttttcacgtaagatttctgcaggttccaggtatctgtcatcctgaaagagaatcgcaccgccctctcccatggaataattctttgtctcatggaagctgtagcagccaaaatcaccgattgttcccagtgcttttcctttataaaaagcattcactccctgcgcggcatcttccaccactttcaggttatattttttcgcaattgccatgatctcatccattgcacagctgacgcctgcataatgaaccggcacgattgctttggtcttttctgtaattgcttcctcaatttttgtctcatcaatgttcatggtatccggacggatgtccacaaacacgcaggtggctccccgtaaaacaaaagcatccgcggtggatacaaaggtatacgacggcatgatcacttcatctcccggctgaatatccgccagaaacgctgccatctccagtgcatgggtacaggaagttgtcagcaatacgttttttgtctgaaacctttccttcatccactgggaacattttttggtaaatggaccgtctccgcagatcataccgtttttttctacggcttctttaatatactctgtttcttttcccacaaacggtgggcggttaaaactgattctcactcttctcactcctgttattgttttgctttgatatcggattgttccgtacttttgactcttgtatcatctcacatcgtataaatcaaaattcctgctatgatcagcaggtttcccacaagttttccttttgtgatcttttcgttcaggatcactcttgaaaagatcagaacaaatacatacgcagccgtatcgatcaccggtccaaaccgcatatctacttttgtataacaccaggtgttcagaagcaatacaccgaaaaagatcccgtacgccacgatcacccgccagttcagatattccagcagcggattgctgtattttttattggcactctgttttaagagtacctgggagatggcagtaaaaaatgtgcctgccagcatcagtaacataaacattctattcatagcgctgcaccacccatacgccggtgagaactaccaggataccgataatattccgtaccgacagattttcatgaaagatcaccactgcccagatctgcgaccacaacaggtacacactcttgttggcatacgcagtggacagggaaaacttctttatcacctgctgccatgcaatggcatagattccgcagtttccgatcatcagtgccaggaacacataaagccagatacttcccagcccgtgccggttatactgcacggatgccatcttggaaaatacgctggtcagggaaaacagcagaatattcaggtgaagctgtatgtaattctttactttttccattgttttttccttttatttttttgtatatcgtctttacgagcgataccatatcatcttattataccattcttatactttcgcttcaagaatacttttctattgcaatttacacttacaatcgacttgggtccactggcaattattgatatgcattacaggcaaaaaagtgcctcgtaacaggcactttttcttattgttccatatgttgtttttctctttgtttgatcttccgtaacagccagaaccagagtgcgccgatttcaatcagataactcactgccagagaaatacttccgccctgcattccatattgctgtatcagcaaatacgcaccaaaatagctgaccggaagtatgatcacattgcatataaccagtcctttgatttctcttactaccgtaagcagtgcacataaaaaccacacgatggcagtcagaatcgtacagcctataagtggaagcagcagatcttcatgcgctgccacctcatccccgtacaaaagttccagcccccagtgtccgaagatctttcctcctcccagagcgacaacactgatcagcaaaattgctgccatacatttgcgaaaggttttccagaaatcccggatatttccactgctgtactgttcggcaaacagcgtaataaacgggttaaatacataggatgctcccatctgaacgatcattgtgggtgctgcaactgatccatagataccgagtgctgcacctcccagaattttttccatgaccagacgcgggatcgtcggaatgaccgatgacatagtctggtaacataacagcggaaagcattccgccatcagtgttatattttttttctctttcagatggatctttatggtatccagcttctttgcccgtggaatatcatagaaaaagatcaccagccaggaaaccagtgccatagcaagaatggctgccagcagactctgtgtcactgccagtaccgccacaaatcccacaaatgaaaggattcctttcaccatccaggactttccgatccagtccatccgccattttttctgacagattccggcatagacatcatagaacgcctccgccatcttaaacagacagtatgcaacgatacacagactcgatccgtagctgtatccggcaatcagtgcataacctacgcagaccaggaatgaaaggatacagatgatcagacggctgctcacatagataccggaggtgtatttttctttcatgtccgatacctgataattgcggataccctgcatagcgatgctgtaaaatacattgttaaccgacatggcaagggtaaggattcccgctgtttccactccggacagccggaccaccagtacactgatcagccactgtgtgatcagatataccatacttcccgccgagttccagataatactcttttgtattgatacttttttttcttccattttttcctttttgttcagcctaccagttttgtcagaagtttcaatccgtgcacccggagtgcacacacaaagatccacggcccgatcttttgtaccgccggaagctggtgaaaatatcccacttttatgtagggatttttatagcatcgtgggaaacaggtttccatgatttcctgtacttcccggcacatcccgtccttcacctctttgcgacatcctcttcccgtatcaaacaacagactcgtcatgatcctgctgataaaaaattccagtttcagtggatccatcggatgctctttgtctgtacagaatgcaatggcatcacgcaattctccaaaaggcagctgccacatctccagtttccggtttttgatcgtagatgttgtcgactggggattcgcacggtaataatattctccgtcctcaatggtctgaatgttggcggcaacggcttccagttttaaaatcagcggaatgtcctcacagatcacaccttcccggaaacggatcttccaggtgtcaaacaactgtcttcgaaccagacggttacagcaaagatacgacggaatccgaatccctttttcctgataattgatctcatacttctgaatgatctcgccctgctctgtcaccttggtataattacacatgaccatatctgacttctgctctatagcggtgtcatacattttcttcagaaaatcttgtcctatgtaatcgtcactgtccacaaacgccacgaactctccggatgccatcgccagtgcatggtttcgcgccgctgactgtccctgattttcctgatagattgcatgaatcttatccggataatttttctcatattctttcagtatatcagccgagtgatctttacttccgtcatctaccgcaaggatctcaattttctcaagggactgctgtaagattgaatccaggcatctgcgaagatagcgttctgcattatagaccggaacaatcaccgatactctgatagtttctttattttccaaatgtcattacctcttctcccggaaactgaatctctacaggcatatgatttaccctgtctttttcatccggaagtttcatataatctccgtagcatctggtaaggatggcatcatatccacatggaatcttcacggtgatatcctcaaacggcacctctaccagctgttccatctcttttttctcaataatccatttttttgcgtctgctgcaaacgttgtcatccgagaactccctttctccggtttcttcataaatgcctgattgcactttttccagaccatcttggcagaaatcccgcaaagatgcattcccccatgcagaatatgccagatggatcgcattacaaagtcttttgccggtccgtactggccgatctgcggctctttgaccttatagatactcaggatcatgccccagcgcaccgcccggttcagctgtttttccatctctgcctcatcatcagaaatctcatcgtaaggaaagatatcaatatagaatccggtaatgcttcccgacttttgcagactgttttccacaaaacgagtgcgattcatgcgtagttttgcaaaatacagatgatattccggatccgtatccacagtctgaagaaaatactcttccccgcattctttctgtgcaatctgaaggaatctctcatagtcttctctcggcattcccacatcaatatcatcgtcccagggaataaatcctttatgccgcaccgttccgagaagtgtcccgaacgccacaaaataacgcagatggtatttttcgcagatttcgatatatttgcataaaatctgtttttccacatccttgattcgattcaatatttccgtatcgtattctctgtactgcaaaactgttcctccccacttttttctgcgttgatcttgcaccattatatctgttgtaaaatccattgtcaaggtaagccgtttccccggaaaaccttgaaataagggattgaaaatgatatgatgaaccacagaacacaaccctttaagaaaggaaatacaagatactatgagtttatattctgttgttgttccggtctataattcggaacataccttaacggagctttatacacgtctcgagaaagtcttccgtgaaaccgtgcaggaaccctttgaactgatccttgtggatgatggttccaaagatcgttcctaccagatcatggaagaacttcgacagaaagatccccgtgtgaagatcatccagatggctagaaacttcggacagcatccggctcttctgtgtggattctctcatgcggagggagatttcatcatcaccatggatgatgatcttcagcatcccccggaagagatcccgaagctgatcaacaccatcagagagcgggacgatgtggatgtcatcatcgccagctatgaaggcagaaagcacggaccgatccgccgtctcggaaccaaagtttctgtctgggccacctccaaaatgcttggaaaagacccgaatctgcagatcaccagttttcgtctgatccgccgtttcctcgtggacgccatgttgcagacaaacacctatcttccgcagatcggcaatcttctggtgttaagttccaaccgtatcatcaatgtaccggtgcatcatgatgcaagagcctacggaaaaagcggttattctttccgccgtctggtcagagacctgctttacgatatcacttcccactcagcattcccgctgcttctggtacgtgatctcggcatctgcagttttctggtcagtgtggcacttggaatctttttcctgatccgctatttcctctacggtatttccgtggagggctggacttccctgatgctcgtactgctggcatttttcggtatcaccctgctttccattggaatcatggggatttatctgatgaatattctgaacgaatccaagaaaatgccgcattatgtcatccgtagaaaagatgtctgacaggaggattgtatgaaacaggaaattggaggatatctggaactggaagttttccacgggaaagaatactatcctgatcttgtaaaagtgaatcttgggcgtacagccctctgctggctgctggaatcccggaagattgaaacgctctatcttccgtttttcctttgtgactccgtaattgatacctgcttgaggcagggaatccacgtgaacttctattcgctgaatgaggatcttacgccggctctttctcccgacctttcccttcatccaggagaatacctctatctggtcaattattacgggcagctgacggatgaaaagattctttattataaaaaatactataaaaatattatcgtggatcacacccacgccttttttcagcatccgcttcccggcgtggatactctgtattcctgtcgcaaatttttcgggctgagtgacggtgcctatctttccacagatgccacgctcactgccggaaaagagcaggatgtctctgcggaacgtatgggacatattctcggccgttttgaaaaagatgccggaacgtattatcagaaaatgttagacaacgccgcgacctatcatcatatggagattctcaccatgtcccgcctgacacagaatctgttaaaagccatcgactacgaacagatccgtcagaaacggaatgaaaattacagatttctgaaagaactgcttccctccgattcaccttttacccgcgtgacaccggacggacccttcgcctatccttattatcataaaaacggaattgcactgcgaaaagccctggcgaaagaaaaaatctttgttccaaccaactggtccaacgtgatccgggactgtgcacccgaatcttacgaatatcagtgggcggcagacattctcccgctcccctgcgaccagcgttacggaaacgaagagatgcagcggatcgcagacgtgatccatgcactggaaccttagaacgtgtctgaaaaatcatttccgcaatctgcaaaccccagtttgcgaaaagcctttttcagacacgctctagaagaaaggattattatgaataaacgtttactgattctcggaaccctcggggaatttgaacagctggtgcagaaagccagagcccggggtatctataccatcgtttgtgacggatacccggacggtccggcacgtgcctttgcagacgaatcttatgtgatcccggttaccgatacggaccggatcgccgccctttgtaaagaaaaacaggtggacggaattctcacctcgttttccgaccttctgctggaatgtatggtgaagatttccgcaaaagcaggtcttccctgctatctgaacccggaacagcttccctggtatcgtgacaaatccgccacccggggactgctcgaagaactcggtcttccctcacctggttttgcaaaaatccccacttccggattggctccggagctgatcgctcacctgcattttcctctggtgacaaaaccactggataaatacggctcccgcggcatctatgtggtacacaatcttgaagaactgaaacaggcaatcactgagaccgcttctttcaccgatcttcctgagattctcgtagaagaatataacgacggttacgaattcaatatgatgacctgggtacataaaggaaaagtccatgtgatcagcatcgcagatcgcgaaaagacggacatcggaccgggggagatcccgatcagcacccgaaatgtctatccatcctgcctgtatgaacaggtggttactccggcaaccgatcttttacagtgctacgccgacaaaaccgggcagaaagagggggcgttatccatgcagtttttctggaaaccggaaaacggcatccaggtctgtgagattgcagcccgattcttcggctacgaacacgaactgaccgatatggtatacgggttctctatcgaggatctgctgttaaattacctgtatgatgttcctgcactggaacagatgctggatcagcacgatccacgaaaaccgatttgccacggagctgtcctgtattttcagggacgcctgttacagattcgtgatctttccgttccgcagaaactagcatctcattctgcggtagaaaaaccatggattttttatcacgaaggagaagctgtcattgcccacggaccgaatccttatgtggcactgtactatatctcctgtccgtccagaaaaaaactggatcaggttaccgatgaatttttcacttctatgaccatcccgtcttcggatggaaaagaagtcctttaccgtaaccagatgcctgactatccaaaaacaaaataagtatgaaaaatgagcttatacagaaatcagtttttcctgtataagctcattttttatagttattcttaataagccgcccgatataccagcacatacgtcagcaatacagaaattgctgctgtcccctgtccgatcctgcagatccatatgcttattttttcatttctgatcagtttttcactccagttttcatatcccagtgtcacaaaatagaaaaatggaagcgccatcggcatgatatagcgtccctgcgcctgaaaatcacttgcataagcataatacaccagcaatccaaccggtatcaccatagctcccaccatacagatatgcatccagtttctcatattccaccatctgttttttctccatatctcagtgataagaattccatctgcatcggcttttttctcttcttttacaaattccgtggtcagacaaaattcccgacgcagtctccagctgtttccaagaattcccactgcaaacacgatcagatacactttactccacagatacggcataaaaatatcaagatgtccgaacgttcccacaaagcttaccagtaccgtaaccagccagttatgctgccattctccaggtacccaccatatcatatccagaacgctcattcccatattcaccggaagcacccgattggagggttttaactcatcgatcgcgtatttttccgcatagatggaagaggttttcattcccagaaaatctccgtcatacaagattccgctccggataaaccaccatccggccacaagaaagacgattcccagcatcaggcagcctttcttcagcagctgctgccagtcccatttctgctctccacacttcatcatgcagcctgcaaaaaatacggcgctcatcagaagatatccatatgcgttgtaataagacaacatacacaatcccatggcacttcccatctgtacacagactttcagggtccagccttccttacacgccctgcaccagcagtacaggatccaggctgtcgtaaaaagtgccagtccatccgtattgatataagaaaacagaaaacaggttcccggaagaaaacacaccagaactgcaaacagccttcctgtctcttttttccgaaataacagttctcctatcttccaggtaaaccatgccattccgcatcccagaaggacattcaccatacgcgccgcaatcaccgtagcccgaaaactgtccgtaaatacctgcacaacctttgcaaatactgctcctgccatataaggaagaattggattaaacgcataggagatgccccagttggcattccgtatctccggatcccgtccatccggcaaggttccatgctttacaataaattcgacgatctggtagcgcatactttcatccggtgaggcatcgaacggtgccgccagcgcccaggaaagataaaatacaaaaaccagaagtacaaaaatccatattgcatatccttttttcactgtttttactgtttttttcattccatcaccctttatgcctgaaaataaccagtttgcttgccacataattcaagatgattacaagtacatttgccacacatttaatcaatacgtcattgaatccacacagatcagcaaaaataaacatacatgcccagtccagtattcccgtagccagacgacaggagaaaaacgaaactatctctttccctatttcttcccttgtactggcttcgctgtgaaatacccattttctgttagtaagatatgcaaacagaaccgataaaatccatgcaagtacagtactcaccataaccgataagccaaacggatgcgcaaagatccaatagctcacaatattaacaagcgttgtcagaacgccgaagacaccgtacggaataatgtcttggtacttgtcccatagcttttctatattcatcttttctacctttcttttaaaaaagcaggtacatttccaccatgcacccgcttttttggttgtttataatcgtttcagtgaaaaatcctggctatccagggtcaggttcggattatagaacggatcgccgttcttcagtatatcgggccagcgtttctcaaacgtagcaatctcctgattgaatcttgccactttctccggagtatcttccagtcctcgggatttggattcgtaatgatacagttccgcatatggattgtacacgatcagatatcctgcctgtcgaagtttcatacagaaatcaatatcgttaaatgccacctgcagttcttcactcaaaccaccgactttctcaaacgcttcccgttttaccatcatacaagccgcagtcaccgcactgtaatcctgtgcacagatgatccggtggcagtacccggtaaatccacgcttctgctgtacaaaacagtgtccggcgattccaccgaaaccgatgaccactccggcatgctggatcgtatcatcttcgtaatacagtctcgcacccacagcacccacatcttctctggtacagtaaccaagcagttcctccaaacaatcgtcgttgatgatctcggtatcgttgtttagcagcaggaaatactctcctttggcatactgcacaccgaaattattgatggcggaataattaaagtggcctttataatacaccacatgcactttcggattaaccgcttcaagctgctcgtaatatgcaaaagtttctttttcttcgctgttgttctccacgataatatattcataattggtatacgtggattttgcttcgattgaatcgatacaccgtttcagatcatcaatatgatctttattcggaataatgatcgagatcagtgggtcataatcccgcaggaattttgtccggtagagtcccaggaactctcccttgctcacttccactttaacaccgatccggtcataatgcgcctgcaccgcccgttgtcccgcatcaaatgcatacagcttgctctccggattctccgatgtggaatcttcatggcatcgccagtgatacaggatcttcggaatatgatggatcttttccgctcccgcatgttccacacaacggaagataaagtcataatcctgcgctccgtcaaactctctgcgtaacattccgacctcatcaatcaacgttttcttcgccacaaacaaatggcagatataattgaccgtacacagcagatccacgttataatccggtttgaaatgtggctggaagaacttgtgtccgtccatcgtcatcttatcttcatccgaatatagaacctctgtttccggtttctcattcagtactttcacacactcatacagggcatgtgccgtcagttcgtcatcatgatccgcaaataccacaaactcacccgttgccgcctcgatcgcagcattcgtattttctgatatctgtaacttttcctgatgatcgatgactttgattctgctctcttccttctgtaactgttttaacagttcccgaatcggagaatccgcaccgcttccgtcagacaggcagagttcccatttgccataagtctgcgcctgcagagattccaccagcgcacggagatatttttccggtgttttataaagcggtacaaccacactgaaggtcggttcccaggaaaaatgttcttttcgctggtgttccagttctgctttacttggcagatgtttcggaagccatttctgatagatcacagcggctttatttttatttttcacttttccgaccactttttgggcaagtgctgccggaccgtgcagtttcagataacggctgccctttttgcagtattcattcatcttttctgcggcaagctgtaccggctgcaggtgaatctgtcttctcacccgtatcgaacctgcctcaaaaacaatataaaattctttcagctgctggtagtgcagttcaaaaaagaacccacatttttctcctacctctgcctccggatactggttctgtacatcgacacgtttcaggtgctggatctcacatggaattctgtttccgcgggaattctccagataaacttttagcggtttcgtataagctgcccagccacgcacccggcagatgccgagtttccggtccacttcggaactctcaatgaaatactgaggcataccctgtcttctgatcagctgttttaccggaattgaaaaccagacctcttttttcccgttctctttcgcataaaccactaactttttatactgttccagcttatctggaagtacaatctccatctgaacacggatcgcatccaccagatccagatcctgaaatcgttccagggcactgatgcgctcctgctgcttcagatttacctccagtgatttcccgtccagttccgctgccgcggtatgttccttgggccaggtgccctgcagatgatagattttctcatctgaaagatcaaatctttctttttctactacgaatacttctcgctgcatagtaattcctctcttgcatcttttcctgtattctgagttacatactgacacatcacttttttatgggctttttcacccatctgtactctggctgtcttctcctcgatcagcgttgtgagcgcttttttccactcctccttgtcactgcaaagccagccatccacaccattttcgatcacgccttccatctcccggtttctgctcatcactgatggcactttcaccagtgcggcttccatccatttgttttcggacttactacaatggaagatactgtcctccagcggcatcagattgatatcgatacctgccataacagaaggtaactgtttccagtccataaacggaagtttttccaccttatttccgaatttttccatttttctgtcagagagtacaccaaccagcttcagccgtacctccggatgttccttcatcacttccagaattgcttcttccgccacctcaaagtcctgatcatgagttttcgatccgctgaagtaaccgatggaaatatgctccgggtctttttccacctgctctactgcgtcatgggacagaatctgcatctccatgcttgcacaattccggttgattaccactggttttcccggaaattctcttcggatctctcccgccagtgtatcagtagaggtaaaatagccatcacacagttccatacaggaatgaatctgttccgtcgtctttttaaaatctttatactcacttcctgtcagaaaatgcagataagagattctttcgtaatcaaagatcagatcgtcaatgtcataatatacgtttaatccggtttttttcgcctgctccactaccttgcacaccacatcttcccggctgcaacggtaacatacaactgcccggtacgcatcccagtccagatcttcgacctcatccacctgataaaaatccgatccgtaaccctgataatgcagctgttccctgaaatgttctacccgataacgggaagcaaacgaaatttcctcacccacaaacagaatcttcttttcgcatacaggcatattctgacacttcagtgtctgttctgcaaactcctgtaattctttcagtgctgcctttgcatctgttcctttcagaaccagacctttttcgtaatgttttacccgctccaccggcgcaccaatcgggaatacagcaaccggcatatgcatggacataatctctgaagttgtatacgagaaggtctccggccagatggatgggataaagaacaggtcaatatcttcttccatcgtcagtctcggaagttcatctctggtatatcttcccgtacaggagaataccggactgtcgatttcttcatccgacaccccgatcagtttcattcggatgttcaggttctgcatctcgatctcttttatcatctccttgacaacatccagaccttttttataacacagcacgccgagcagaccaatgttcagtgtcctggtcgtcttcaccttcttatccagtgccgtcacataatgcggtttgtgtggcagcacatgtaactgatacagataaggataggtctttttaaatatctgtgccgtatcatcagagaatgccagaatctcatcacaccgggataaaaactccctccagtgtgttctccatgcggttccggactcatagtccagacatgcattgcttcggtttgccgggatacactggttacaaatctgtgcatccgcgccatgacagtatttcccctgagcatccatcagatttaccgccggacacatgaagaaaaagtcatgaagcaacatcttcagatgtgcctgatgtttttctttcagttcaagaatctgatccagaacctgatagattttctgataagttaccagttcgttgatccagatttcatccactctcggaatctcatcaaggatcatctccagatctttagcaaaatactgaaccttatattttttgtattcatattccagataatagcgcatattatcgatgtcaaaccggacagtcaggaaacgttttccttctttcagtgccagtttacgtttctcaatcagatattccgtggcaccaccgccgaggttatgatcaaaggcaacaatcgtcggtacatccagcaactgatttaacagctgtgtttccacatacagtcggatcgttcttgccggatctctccgacagaaagctgccgtatcgctgttataattcggatgtttcttcgccagtctctccagatggctctttagcagccgtaatttttcttcggaagaaaaacttccgccatgtttgtgataaacaaacagattctccacctgtacattggtataacctgcctggatcgcccgctgacaccagtcattttcttctccgtatcctttgtcaaagttctcctcatccagaagacctacttctctgattgcttccagattcatacccatacagaaaccgatacctgtcggcatggtcgcatactgcggacggatctggcgaaaagcatcatcgatctgccataatggcataccttcaaaaatgacattatcctcacaaaaattaggaaagctgcagatggttccgcaggtcgtaaacggtgtggaggatgctactttttcttttgtaaagatcggccacatcagtctctccagccatccctccggcacttccacatcggtattgaccagtgctacatgatgctctgcaattgcaagggcacggtttacagacgggaggaatcccatatttttctcatttcgaagcagaaccgttccctcatgttctgccacgtatcgctccagatattcccgtactgccggatccggactctgatcgtccactagaatcagacggtatttcatctttgtcttttcaatccccgcaaacagcttgtcaaaatactgtaagccattataaatcgggataataatatctatcacttcatccgaaggaatcttcgcatcaaataccggcgtttcttccagataacgttctttaaaatatcgaatattgccgatgctctcctgtccctccagggtatacacctgtatctcattacaccccggatctgcagggatcttgcataacggatatgctttttctccgtctacggtgtcgtaaacaactgccacttccgtttccactggtgaatgcaccaccagcacacaggaaaatccacaggattctgcctccggaatctgtaaaacagctgccacatcgctccgatatactacagtaatcggttcttccgccaccacttccccgttctgtaaaaaagcaagatgcgtgttctccatggcgtacgcacggtcaaatgcccagccgataatctgcagcacattattttcatagctgaagctgtcgatacttcccacacagctcgataccggctgttctgtctgttgattttctgtaaccagtggggccacaggacgtccaagcatcttcttcaccagacgttttgttctctgtttcggtcgatgctgaaattccatggctgcccgaagttcttcctgccttctctcttcttcggcttttttcgctgctatccgttcttctttttgtatctgctgctgaagttttctttcttcttcccgacgtaccgcttcttttcgatcctcttccagttggatttcttctgcgatctctttctgcgacagaaaacgaatttgaccggaaattgtaattttcttcaattctgacggatccgtcacatggataaaatatccgcctgccagattcaggaacactaccgcatccgccgccttgtcgatccgcataccaaacggaattaactccccatggcatccgcagtcaagtacttccactttcacctcacagaatgtatcacttaacagattccagcggattccgcagatattttctactttctgcagatcaaacgtaacctgaaatcttccccgatccaattccaccgccgtctcaatactgttctcttccgacagtccagaacctgtatcatagtacagtttgctgcgaaatcgctttttctcctgacatgcgcgcacagtttctgacagatccaccggaattctctctttccggtatacatccagcgaatcgctgccaacatattcataagtaaaatgcattgtccatgccatgaaaatttcgctgtccgatggttctataccgaattcgtgattcatatcgtcctgtgtatacagcgcgcccagtttcgggattcggtaatacagttcatggatcattctccacatgataaaggcaaccggaactggaaagtcaaaagtccattcatagtcaatgatttcataatcatctccgaactcaaagatattcgcacagatcagatcaatgtttgccggacttacgcattcataatattccttgcccggatgttctccaaacacttccttaaaaactttcgtctggtactccggttcttttttccgctgtgcgaacacatgctcatatacatgtttcagggttctcagaatctcatctgtctgttctttctccacaagatcacgaattctgtcttcaagtgttttcccgctcaataccggatacacgattcccccattctcatatctgcacggaagattacgaaatccttttcctggtttctgcgctcctgtttttttcagtcctgctataaagttttctgcctccgggcacagtggttttttctctgcccacacactttcctctttccgcaccaactgggtcagggttcgaaactctttcctgcggccctgattcagttttacatatagaatttcttctttttcttcaagttcctgttttcctgcaaccagaagaaaagaattcacaaaacggtccgcgatctgttcttttttcattgcctcgataccggcgctttctgaaaacagatccacggttttgtccgtgtagatcggataatttttcccataatgattggtggtcagtgacgcatccgtaaagatctccgttggaaatttataatccggatacgggtaataaaatttttgaaaaggaaatccgctttttttcacaagttcctgcaattctgttttggaaaatgttctgacactgtgattttccggataaccattgattccaaagaagggaatgtccgtatgatcttccggggccccggcaaaatacttcattcccagcttattctcaattgcgatcagcaattttcctgtatttttcaagtaagaacccattttccctaaaaatgtctcatacggtgtatcgccctctgtaaagctcatggcatattccagtactccattgactaccacatagtcatactgctgccccagatccatgtcattgagatttcccaccatgatggtcagattatcttttttctcattgcggtaataattgatctgtgctcttcttttcgagagttccacagatgtaacctgacctgctttttcacagagcgtacctgtgattgcaccacagcccgcaccgatctccagaacactgtccgattttttgatcggataccagttcagtatatttgctcgcagatctgagaagtgatagatcacaggaaaagaaacctgctcactggaaagatcctcacaggttactccttcttttgccatcttaagcatctgttcttcgatatctccatctgaatacagatctttttgcgtataatactctaagttcagtattgccattcttttcctcctcagttactttaacgtgacctttgagaacagatcaaaatatccgacagctttcttatccgtaatgactgtcagattacatacatcatacaaccggtggaacacggtaaaatcaccatcccggtaaccggtacatcccagacacaacatatattctccggcctctaacggcatcttctgtgtaaaggtgatccgtctggtttctcccgccttctgtgtacctaccggtgtattctcatacatcgtattggttccggtgatctccgttcctttcagatctttgatcgtgaaagcaaaaatcggttcctggatcgtttcatgaaaatgaattttcatatccacggaaaattcttctcccttttcaatcacattcgtaaccattccggacttatcacgaattgcaaagtcctgaatttctgctaatttacttccatattccagtacttttggatttagatttaactgatctttcgtactcttttcttcttgtacctctggcgtttcttcctgcgcagtgttctgttcccctggttcatcatactggttcaccagaacacgacgatacagattgaccatctctttcgcatcgccttctgccagtttttctcctttgtttaacagaacaacccggtcacaatatttcccgatgctgctcaggtcatgacttacaaaaagaatggtttttcccatctctttaaattcttcaaacttccggtaacatttcgcctgaaaaaagacatctcctacggaaagtgcttcatctacgatcagaatttccggttcgatattaatagctaccgcaaaagccaatcgcacaaacataccactggaatacgtttttaccggttggtggataaaatctccgatatctgcaaaatccaggatatcctgcagttttgcatcgatctcttctttgctgaatccgatcatctgaccgttcaaatacacgttttcgataccggaatactctccgttgaatccggctcccagttccaacaacgcggagattcttccatccaccaccacttctccctgtgtgggattcagtacgccggtgataatttttaaaatcgtggatttaccggaaccattcgttccgataattcccacggtctccccttttttcacctgaaaacttacgttgttcaaagcataatgttctttatatcttttttttcttgtcaatccgagggattcttttaaccgatccatcggattctcgtacagtttatacatcttactgatgttattcactgaaattgcaatctctgacatctgtaaacctctctttgatttctcttaaagtacatctgcaaaatgtggtttcagtctcttgaagatccaggaaccaagtgcaaacaatactactgttacgatccagaagtatacggtccatccccagtgattccagaaccatacgtgacccagcatggaatcacggtatccggtaacaatatagtacatcggattcaatttgaacagtttgatcagccacggataatttgacagcatgttgacatcccacatgattggtgtcagccagacacccacctgtaagaaaatactgatgatctgtgtcagatcccggaagaatacaacgatcgcactggtcgcatataccagccccagtgtaaacataaatgtgcagagcgaataataaaagatctgcaatgttgccagcgacggcgtatagccatacaggctgcataaaaccagtgaaaacacaacgaaaaaggcatgtacaaataaagcggaaatcatctttacgatcggcagtacactgattttaaacacaacttttttaaccaggtagttgtattccatcagtgcattggttccaccattcaatgcatcctggaaaaagaaccatggtacaatacctgataccaaatatagaacaaatggataatccgatacatttcctgctttcagaccgacagaaaagacaaaccaatataccagaatcgtaacgattggctgtacaaatgcccatacgattccaagatacgaccctgcatacttcgttttgaagtcattctttgccagattcataatcagttttctgttctgtaaaagctcgattgggagtgtcagtactttcttccggaaaacaaacgcaaccactgctccaccgtcaatcagtaacagcatcagaatatttttgatccacaatttctgtgtataatctttctcgagaaccggatacagttcttctttatccagatgcagccacacataaggatctgttccattcgtccagatttttaatgttccgtcattagcttccaggctctccagttgctgaccttcgatcagcttcggattcgtcatctccggaatctctgttttcgtatctttacatccaagataaacattttcaattgtgaacgttcccggctgcgtgcccagatccagacgcaccatattaaactgaaatggaacagaaaaaaccagttcctgactttctccaacctgatcatacgtcttgagctgacttgatttttctgaaagttctccggccgcactgtaatagacctgaatctcctgttccttatcgctgttcatcgtaagatgaagctcataattaccgcctacacttcctctgtgacatacgatcagcacatttaaaaccagtaaacacaacacgcagataccggccagaatctttttctttcttcccatttcatttccctcttatcgatttttgtactccgcaaagcttccccacttctgatccttgtcagagatggtcagttcttcttttgtcattccttccggcatcggccattctacgccaatctccggatcatcccatttcagcccgccttcatcgtttgggtgataaaaatcggtacatttatacgcaaattctgcggactcggacagtacgataaatccatgcgcaaaattctttggaataaagaactgttttttattctctgcggacagcacaacaccaaaccattttccatatgtttcagaacccgggcgcagatccactgccacatcaaagacctccccactaactacccgcaccagtttgtcctgtggataattaatctggaaatgcagtcctcttaaaactccttttttggaacttgactggttatcctgtacgaattccatatcaatgcctgctgctttataatcattataattatatgtttccataaaatatccgcgttcatcgccaaacactgtcggcgtgattactttcagtccttcaatttcacatgtttctactgtaatttttcccatttttttatcctctctttaataaaatattctctcctgcaagcaggtttttaacacaaacgagcagtaccctgataaaggatactgctgtttttattgcattgcatatcaataattgatccagtgaatcaattttgatttccatgatgttttattataccatcatcgttcttattcttcaactccaacgattttttcctggcagacagatttacacaatcattgctttccatacatcaaaaactgtaaggatttctagaatatacatggaaatcatgatccctttgcagtatctttccactcgaagtgtctgttttccctttaacatcagcaccaacattggcaaaaatggcaaaaaatatcgtccctgaactcccgctacgtttttccattgaggcggtgtaaaatcaagccacatactcagcactattccgccaatcataatcaatgacagcatgccaaccagtactttctgtttattcgtcatgtaatccgcctttttatctgtaaataaagcaaataccatacacaacagaaatcctgtaatatttatccaggaaattttcacctgtagccatcccaacgactgtcctataattgttcccagatagtactctccctgttcaaaatacgtattaaacagtacacccatactgtttaccggatcttccagaatctgggcaagagtccatcctctttcaatatccgaatatcctgttcccggagcagacgtcaggtttgctacaactgcccctcttagaagcattgtaaccattccaatcacaactataatccctatttttcccgcaagcacaccgcgcggattatttgatttggacgatggtatcaggaagatgattccacatacaaagatataaaccagtttacacggtgccatccacattccgacaacagtcagaaacgcataatctttccacgtcaccctctccttctcataaatcaggtacattgtataaccgatgaaaagaaaacagagtgcgtttactgtacagtcataagaatacgacgctgcaatctccagactcatcggaaacagcgcaatcaccgccattaccatctttccccatggcataaaacgaactgcccagaaaacacatagcagataaaacaacaatgctgtgatctttcccagatacaatgtaatcataccatttgcatggaaaagccagccgattgcaattccgacagcctgcggcagatgcgcggcaaatggtgcagccaatggtcctcgattcaatgcagctggttcctgtccccctttttgaagaagctgattataataataggaagcatctgccagcgaaatcgccattttatcctgaatctgtgcatcagtctttcgcaccagaacatagccttcttcgtctacgccattttgaaacagtatcttatttgcatcataatatgctgttgctatatgactgtgctcatccggtgccgtattgggtggaaaaagtacaatatacatacttcctataaagagtcccagaacaagaaaataccactccactctcttttcttttcgcatgagcagaagcccaaatgcgacaagcgagagacacagaattacgcccacacatgcatatatattctttaaaaatgcatttgttgcctgtaagttaaaaaccatacaccctgtctcgtcattcccgtcggtttttacatgttctccataagcctcataattcgtcaccgccggaacaatagcagaattttccgggattgttacgtgaataatgtacttttctcccataatttcttccagtggaacactcagatgaaatgtctggtagctgtaatcccctactgtatttccgtcaatttcccatttttggatctgctctctgtccgtcgcttttaaaagttccacctgcacaggctcctctgcctgctgttcaagttttcgaaacattacattaaactctgtcagttcgttttcatcaacaataaactgttgttccatttcacggacctctatgtatcctgttttgtcctgaaactgttcttctgatgcttcaatctgcagataggagtgttggttgtttgctgtttcccggattctccagtaataaacgctcaaaaggattacacagagtccgatcattgcacacagcagacccaaccattttttatattcttttttgttcattttttccttcctcttactacttcttttcgtgtttttcatcatatcatttattcttattttatacaagttttcattcttacgtttttctatcgttccttgatttttctattataactgttataatgaacatgattatatgtaacgcgttgcctatttatttttttctttctgctgcgtgttattttttaggaaaggagttgtttcacaaaatattatgaaaaacagattaaaacacctgctgtgtggcgtttcggcactttgtatggcgggcagtctggtgtttgcatcgccttccgggataagtacggttcaggcagctactacagattctacttttcacagtacagacggcacgattcattttcttaccttaaatcacaatactgatgccattctcatcgaatgtgatggaaaattcggtatggtcgactccggtgaagacaatgattatccagatggcagtgatccccgctatcctttacgtgcaggcattaccaaaggactgggattcgaaaatcaggtgatttcctatctgaaaagtatgggtgttacaaaagataactttgaattctatataggcactcatcctcacagcgatcatatcggatctgcagatgaaatcatccgtgcgtttcatccaaaacgtgtctatctggaaccttattcagacagcgatatcactgattccacacattattgggataatctctatgtctatgatcgcgctgttgccgctgccaaggagaccggggcaacactcattcagtattttaatacggatgcaccactctatcctgagacagtcacagtaaagggaagcattgtctggacagtgccggaggagccggaagtccccgaagaacccgaagaaattcagaaaccagaacagagtaccccgaacgattcagatgcagacaccgaacttgaaggggatgatgattctgatgtcccagcgcaggagcctgatactactgaatctgatatttcatcagattcttcatctggttctgaatccgagtcagaaccagatgcaccggctgctaccgaagaaccaactgtgcagaacaacgatactgtcacggaaacttcttctgaaaccataaaagatctttccgcttctacggaaacgcagagtgatgtagtttcacttgcaactgtttcaacagctgcaacgccggtcacagaaacttccacacagaatgatgattcagcctcgatcaaccctccggatacgatgtcagttactctgtcctggggagataaccagtctgtaacgttaacttccgataccacatcggaacatggatctgttaccaaagtctctgagaaccagtgggactatgagttccagtccattcccaaatacgatgataccaaatctgcttatacgtataccgttacaccggaagcggatggttattctttctctaaacttggagattctgattatgatttcagttgtgcacccgctgatgcttctgctgaaacaacagcctctacatcagcagaatctctgaatatccaccccctggacagtggtattctggatgaagatgtaagttcttcactctccggtacctcagacaatctggttacttccagtattccatccagcgaccgcgtagttgccggaactgacagtgacccgaccaatgcaaatcaggatgaaaaggcagcatccggacagcgcagtatttatgaaaatgaaacaggacacgtatccacacctattttctatctgggagatcagaatacactcaaaatagaaatcatgaattatggtgtttcacgtccacagcctgatgcaaattattttagtcttggtgtaaaagttacttccatgcaaaccggaactaccgcttttttgtctggtgacatcaataactatccgctgttggattccaacttgaaacctactaacaaacgtacggaatctgctcttgcacaaaagttgggacatataaatctattaaagcttggtcatcatggatcctacggttctaataccgacagttatcttcgtgctttaagccctgatatggcaattatgaccggtacctatacctatgtaaccgactcaaccttcaacggtgaatgcggtacccgtgacacactgctcgcgatgggtgaacgtggtactccactatatgctaccggatggtacgcaggcagtcagcccgctcttgtgattcatctgaatccgtctcttgacaacaacattccatccggaagaagtctggtagctattggcaatattgatggttccacagtctctgtttattacgagaatggtttcccaacagtttgcagtggatggaaaaaagataattatggcaattattattatttccaaaattcctcaactccgctgactaatcagttcgttgaggataataatgcctggtattatgtgaatgcctccggtcagaggaccaccggatggatctatgttaacggctattattactatcttgatccttctaccggtgccatggtcacaggatggattcagcttaataatatctggtattatcttggggcagatggtgctatgtacaccggtacacataccatcaatggttccgaatataccttcaattctgacggatctgtggtcacatctgcctgggttggaaataaatattacggagctgatggcgtatggattccatattacaaaaacgaaaactggagaaaagataccaatggttactggtatcagcgtcctgatggtacttaccctgtcagtcagtgggaaagtatcgatgggcattggtactatttcaatgccagtggatatatgatcagcaacaattggttaaaacttggaaaaacttggtattatctggatgagaatggtgctatgcataccggctggctccacctgggaggcagttggtattatatggacgcatccggtgccatgcttaccggctgggcatatcttggcaatggctggtactactttggtggaaatggtgccatgtaccctggcggttggcatatcataaataatacttactattatatgcattccaacggttctatggcggctgacacctggatcggttcctactatgtcaacgcatccggtgcatgggttcccggcaaagtaaaatacactgccggctggatccagaacggttcccgctggtggtatcgtcatcaggacggcagctacactaccaatggctgggaatatattaacggacagtggtattactttgatcagtccggctggatggttaccggatggctgaaacttggcaatacctggtattacctcactggctccggagctatggcaaccggatggatcaatctcggcggtacctggtactatctgaatggttccggcgctatggcagccaacacctggatcggttcctgttatgtaaacagttccggtgcatgggttcctgatcacctgagagtatctgccggctgggttcagagtggttcccgctggtggtatcgtcattcaggcggtggttacactaccaatggctgggaatatattaacggacagtggtattactttgatcagtccggctggatggttaccggatggctgaaacttggcaatacctggtactacctgaccggctccggcgctatggcagccaacacccgtatcggttcctattatgtaaacggttccggtgcatggattcctggtgcttaaacaaatcaagaaaaaaagaaggggaaaatccatcaggattttctccttctttttttctttttcgtatgttttcgaattccggaaacaatcgtaactaccagagtaactgcgatcaatcccgccagaatatagatcacatagcgatataccgtcatatcctgcgttttttcttcctgtcccatgttcgaatcagaagattccggcgctacctcaggtgtcggcgttgtctcctctgccgctatctctgaaggttcttcctcctgcacctcttcggaaccgcttcccacataataatccgttccataataataggaattatctgtattggtcagatcacttacctgtacatctttcggtatcgtgaccgctcctcccggtacctctactttctgaaaattattaaacccataatcaaacatactgatatgatcctgacacacctgtccggcatccgcccgcattgccactgcgatcagtgtcattccatctcttgtcgcaccactgaccagtgtattttttgatgcttccgtcacgcctgtcttgccaccaaaacatccttcatagtattccggtgctccctgtgccaccagtgcatgatgcgtggaatacgtccgactttctggattcatatttgtcggatcaatcgtaaagctctgtgtaccgataatatccagaaaatcctgatttttgattgcttccctgaaaatcagtgccatatcgtgtgccgttgtataatgattctcatccggcattccgctggcatttacaaagtgtgtattgacacagccaagctcctgcgctttctggttcatcatatctgcaaaggcagctaccgatccggcaatctgcactgctatctgtgttgccacatcatttgctgaccgtatcatcaatgccagcagacactgacgcatcgtcagcacctcgcctacctgcatgccgatatttccactatccgatgtctgatctgccagacattcctctgtaaatgtcacctgatcatccagattgctgttttccagtgccagaagtgccgtcatgatctttgtgatactcgccggatatctcttttcatccattcccttattataaaggattgttcctgtatctgcatccatcagcactgctgtctccgaataagtatccgggccctgtggccagccttctatggcattcgttgtgatcggataagatgccccgttatccacctctgccgcctgtaccgtgacagctgacagaccgatcacaccagccagcagccataccgtcgcctttttacagatttttcttatcataatactatgtactcctcgtatttttcttcctgttcattttctgaacaattacaaatttacctttcattcgtactattctatctcatatccgttctttcttcaagttttttgtttttgcagaatcttctctctgaacattgccctgttttttctctcatggtatactgaaaatagtatcgttcaggaggggttagatgaaatcttttaaacaccactatttttattatccatttttcatgctgcttacggtcttttttcttttcttttccggtacgatcgtatctgccgctgtaaaaacttcagatctggaaactgttccatggagtatggtaacagaatcttctataataaatgaaaaaggctggctgcagtccatgtgcgccactgatcaatatattgtatgtctggtaaatgcgtcaaaaaaaggcacggatccggacaccctgattgccttctaccgaaacgccacagataccgacggcaatcccgtagaacagtacagttatgctttcagcgtgacagaaaccgattatgaacatggaaacggcatgacttacaatcccagtacccaggagatcgcaattgccggtctttttaccaatgatccttctgatgccggagccatctttatcgttgatgccaacactttgcatttcaaacggaaagtgcaggtcggaaacggaagtatcaatttctttggcatcgactatgttccggaaaaagatcagtatgttctgatggcaaaccgcattgccgattatgccttttattttaccgacagtaattttcagatcgtagataaattaaatctgcatctttcctacagccgcagttccttccaggatttttgtgtttccggcgatgcgattatcagcattccatatatgcagcgggaaggctatatgaatgtactggatgtttattcgatctcccggcaaaaacgaattggaagttattacctcacactgccaggtcatgatgcctttgaggtcgagccggaaggcatctgccagctcgaacccggacattttctgatggcatctgccatcatcggtaccactcgcttccgtctgtacgaagccacccttccactggtccatagtgtcacaaccagtgcggaaaacggaaaaatcacggacagtaatctggaaatcgatgaaggcggttcctataccgtctcctacggatgcgataccgatcatcgcctgcagtctcttctgattgacggcgaagctgtggatgtcagccaatatcctctttcctatacattcacagatctgcaggaagatcgcacaatacaggctgtttttgaagaaataccggtctataccgtctctacctcagctaccaacggaaccatcgctacctcaccatccgggaaagagcatgaacctttgtctgtcacttttactcctgatgagcattacgttgtagatactctcactgtagatggtgccactgtccctgttaccagtgacacttccggctatgtatttgatgatctgacttcggatcacacgattgatgtgactttcaaaccgatcccgtcatatacaatcactgttacagcccaaaacggtaccgtggatacttctccggttacagtctaccgcggggattcctacacaaccaccgctacaccggatacctcctgttttctgcactcctgcctggtggacggaaaagagtatactttcaaaaagggagaaaataatatcacgctgactgccattcagtccgaccatacaatcgaactgatctacagccgcgtggactggatgcttgttcttttgctttccatcctgtttctgatcgtaattttactgatcttcctcttctatctgaagattcgaagatggcatcacaaaaagaaacgaaaaaaggagcttgctcagatgcgccagaaagatattgctttcttcgaaactctggaacagatggacctcaaaaaacgtaaggattcttacgattcctcctctcaccttgacaagcattaaaaaataagctaaagtttgtatgatattttgttaaaaggataaaataaatgaattatacaggaaaaaatcacacatttgccatttgtgcatataaggaaagtccgtttctggaagagtgtattcagtcacttctgggacagacgattccttctacaataattattgtcacttccacagataacgcttacattcaaaatatggctgaaaaataccatctggagcttttcatcaatcagggagaatcaggcatcacccaggactggatgtttgcttaccgaagtgccagaacggaactgatgaccatcgcacatcaggacgatacttatgatcggctttatactgaaactgtgttacagaaactttctgctgccagacatccattgattgcctttacagactatggagaactgagaaacggagctattgtaaataaaaatacgcttttaaaggtaaaacgtacaatgttgcttccgttgcacctgaagatatttcataacagtatttttgtccgccgacgggttctttccttcggctgtccaatctgttgtccttctgtaaccttcgtaaaagataatcttccggatcagatcttcttccctggttttcgaagtgacgaagactggcaggcatgggaactgctttccaggaaaagaggagcctttgtctattgtaacaggatcctgatgtatcaccgaattcatgatggctcggaaacatccgccattcttggcgattctgcacgtggaaatgaagatttccagatgttttgcaagttctggccaaagccgattgcccggcttctgacacgcgcctattcatcaagtgaaaaatcaaacgaattggagaacaaatgaaaagtttaattattattcccgcttataatgaagaagcatgtatcgaacaaaccgtgcgggatattttggaacatgcaccgaactttgattatattgtaattaacgactgttcaaaagatcgaacaaaagaaatctgtgagaaaaaccatttccactatattgatcttcctgtcaatcttggaatcggtggtgccgtacaaaccggttataaatatgcctgcaatcatggatatgattacgctgtacaggtagatggagacggacaacatgatcctcgctttctcgaacaaatgcttcaggtcatgcaggaaaaaaaactggacatgctgatcggatcccgttttattaccaaggaaggctttcagtcgtccggactgcgtcgtaccggtatcaaatactttacctggctgatccgtctgctgaccggaaaaaccatcactgatcccacctcaggactccgcatgatcaacaaagatattatccaatactttgccaaagagtatccacgtgattatccggaaccggaaagtatcgttgccgtcctgaaacgcaagaaaaaagtacaggaaattcctgtcattatgcgtgcccgcgccggtggtgtttcctctatttctccattaaattccatttattatatggtaaaagttaccattgcgattctgatagaacgaattcgatgatatatctcagtgaggtgtttacatatgcatgaatataggatacaaataattctggctgttttactggtttttcttctttataaactgttgcgctctgttttaaagaagaaactggaaatcaaatacgtactttcctggataatcgttgatttttgtttgctgatcatcgacttattcccatcgattcttacctttttatgcaagtgccttgggattcaactggcttccaatatgattttcctggttgccattattctgctgtttttactggcactttcccacacgattctgctctctaaattagtagaatccaataaaaacttaacccaggaaattgctcttttaaaaaaagaattgaaagatacgatgagataaaaaaataacaccaaaggtgttatttttttatctcatccattctctcagatacttctcactacatcgttcccgatgtggattaaatacattattgaattctgcatatttcttttcatacttatccaccatattcggtagatttttcagggttttcaacacttcttcctgattcatcaacaccgggcccggaagcatgtggatatcgaagtaaaagtcacgcatctcatgtttatactgttcataatcatacatgaaaaacagaatcgggcgtctcagattggcataatcaaagaatacactcgaataatccgtgatcagcacgtcagccgccagatacagaggattgatgtcatccatctgcgacacatcatatacaaacccctgaaacgcttcaaaatcaaaggaattactgataaaataatgtgcccggaataacaccacatattccccgccaagcacttctcgccaccgtttaaaatccaccggcagctgaaactgatatccctcacccgggagatgctgattctcccgccaggtcggtgcatacagaattactttcttgcccttcggaattctcagttcctgacgcgccttctcacaatccatatctgagaacttaaccagatcatcatttctcgggtatcccatttccagaagtacctgctcttttccctcttccttcagatgaaaggccgacgcaatcttttcagaatagaattcggatggcgatggcatatgcgttacccgttttgtctcttccagataattttcctgtacttccagcagacttccatttttttctgcataatgatccaggtcatatcccagccgttttaacggtgtcccatgccagcactgaatatattcctgcccttctttcggctgcagttccctcggaagccgcgaattcgtcacccagaacttcgcggatgcatatgcacggtagtattccccgcttcgataacgaactacttttgtatgcggctcctgctccatctcgcgatacttctccggttcccggaacgcccagatcagctcccagtcctgatactgaggatcccggcacatcgcctgatacaatgcttttggactgcacgcatatttttttcccatatacgcctcaaaaatcacctttttcggattgatctcttccttttccacatatcccttctgatactgcagttttttccaccagtaatacacacgaagactccatgttttcgtccatggagtcttactgcagattctggccatccatttccaggcactcatcttttcccctgtctttctacatacaatcacatcatccggttacttatcttctgaaccgcctatttatgccataaattcattataagcatccaatacagtcttcgtatcaccctgcatcttaatctccccttcatggagccataacagactagtacacaacttctccagcgtctctgtactgtgcgatacgattactacagtacgattctcatccatgatcagttcctgcatcttcttataactcttcttcttgaacttggcatcacccacgctcagaacctcgtcaatcagcataatatctgtttcaagaaccgccgtaatagaaaatgccagttttgaatacataccgctggaatacgtctttaccggcatatcgatgaattttcccagattggcaaactcgataatctcatccatcttatcccgtacttcctgctccgagaaacccagcagcattcccgataaaataatgttttcccgtccgcttaattttttctgaaatccaacaccgatggaaaggagggatacagaatccgattctagttcaatacttccggagtccgccgaaaaaattccggcaattgcgcggagcaacgtggatttaccgcttccattctttccgacgattcccatgatttctccctttttcacttcaaaagagatacctctcagggcttcatatacttccagcttactctttctcagatgaaaaagactttttctcatagaaagagactttacacacttgtaggtaatcttcagatcttttacctcaattgcatttcctggtttcatagcttaaatcctttcgtagatttgtcacactggcctctgctttggtcagctgaccggtaacacattctatattacctttacataattattttcatttttatatatgattgccacaccgattgccgataatactgatccgatcacaaaccacagcaagatcagtcttctgtgcggtgtctcacagtaaaccagtgacgaccggcaggcatcgatcagaaatcccacgggattcacctttaataacaatgtggcgattgcttcattgactctgtctgtgatcacgtaaaagataccagacatataaaaaagaattcgtaaccccacgttggtaatattcttaaggtcatcaaagaaaaccccaaaatgagccagtatcgcactcacaccaaaggttatcagaatcagatccacaaagatcggaatcacatagatcacattatacgaaaccggtacatgggaccagagcatcatcacgatcacgattccaaaagaaatcatcatcttaaacagattctgaaacagcagaataatgatcaggaaatacttgggaatatatactttcgttactaccgcccggttcaccgccacgatccgtacgcttccggatactgttttattaaacagattccacatggacagacctacaaagacaaagatatgaaaatattcttttttctgtccgaaaatcaccatgaaaataaaccagtataccagcataaataaaataggatccaaaatccaccatagccagctcaaatgtgagctggccacttctgacttcaatcccgattttgttgcatattttgcataaggcatatagcgctttatgtctttccaaaatcgtttcatttactttcttatcctttctcgccccggaatacccagtctacaaaacgcctgcttgcctgaccatcttcccgtttgctgaaggtttcgttgaattcccggtatttgtcgtcgtagacaaaattatcgatactgtcacggatcgcatccggcagttcttcttcctttgtaatgatctttcccggaagtttatcaataccaaaatagaatccgcggatactgtccttataatcttccagatcatacatataaaacagcatcggctttttcaaaattccataatcaaagaatacgctggaataatccgtgatcagcagatcagcgatcagatacagatggttaatgtcatcataattggatacattatagataaatccttcgtaatcatcaaatgagaacttacttgccaccagatagtgtacacggaataagatcacatattcatcgcccagctcctgccgcagtgcatcaaaatccacattcaggtcataagtgaatcctgtacccgcctcatgctgattgtctctccaggtcggtgcatacagaattacttttttatcctccggaatctccagtttctctttgatcatccggatatcttcctgtgtatgattgataagaaaatcatttctcggataaccgatttccatgactttatcttccatcttcgtttctttcagattccatgcggaagtaaatttctcactggcaaatcctgatggcgaaagaatataattgaatttttctgcatccatcgcatattttttccgaatatcagcaatagagtcgatagcattttccgaagtttccagatcatatcccagacgttttaacggtgttccatgccagcactgcacatagacctgatctttctggggccagacatgatccggcacacgatagttcgtaatccagtattttgctctgatcagttttttttcataaactcttgctgtttgttttaccacgatcgtattcggattttcttccagaaaacgatgtttttttgcatttttaaacgcccagataaatgtccagtctttaaactcatcctgtgtcagcatatactcatacactgctttcggactgcatccatacgtttttccgttaaaagaattaaatactactgttttctcgtcaggagtcacgccaagcccccgccaccaataataaattctccgcttggtatacaggattttcttccagcactttcgaaaacgtgggtgcgttttcgaatactgagccaggcgtttctttatcgggcttttaaagaatctccgaatcagttttctcctctttttccgaattttctttataatcttcatcttttaactcctacttctttcccagatcctttttaatctgtgttgtggaaatctccggtgtacgtggaagataaaccacgtcacagtattcttttaaaaagtcaaactttccttcccagtcatctccgattacgaacgtgtccaccttgaattctttcacatccgaaatcttctgctcccaagactcttccggaataaccagatccacataacggatcgcttccagcaaactctttctctcctcataggagaaatagcatttcttctgtttttcattccagttaaattcatcggtagacaaagcaacgatcagataatctccaagtgccttggctctctgcagtaatttgacatgtccataatgaagaagatcatacgttccatacgtgattacttttctcatttttttctcctttttatacctttcaccctcctgtatacctggtaaatataacttttttcagagggattttttgtttctgtctttcatcgaatacacatcatctttaccattctgcaaatatcttcgctgcatggtttttgtattttattaaattttctttcaattttctttcgattttcgacataattcatttcattatacaacaaaccctctatggaattcaagaactctgcataacttttcggttttggtcccggagttacctcatcgtaatcaaaattaaacccccgtgtcttcagatatgcttcccggtcatatggtaaaaataaaatcggacgttccagcaacaaataatcaatataaatactggaataatctgtgatcaacagatcaaacatcaccagtacttccataatatcttctatcctgtcctcattcagaaagcgaatccggcttcccggacgatctaatgcctttagccactcatctccttctttctcatacagatgcatacggatacacataatacactgatttttttccagaaaattctgtaactgttctaccgctcttccacggttttctccgtggaattcttcaaacggaaacagtctggtttccccatcatcccggaatgtaggcgcatatagaagcaaagaatcaaattccggaagcttttctttttgaaaaatcttttgcatttgttcccggacatttattttttcaaataacttatcatttcttggctgtccccacactttgactctttcctgttccaccagaaaacttctgctcatcaacggaatcaactcttctgaagtagtaacaactgcttcataattatccgcaaacagatatttgtagtacagctttgtcatccatcccagattttcctgctccatcccgattttttttaacggtaccccatgccacagattgataatacaatatttttttcgaaatcccatcccatacaacggcggtgcagtggacgtaaaccagactttacattccagcacttttcgtattccttccatagtgctggtatcaataatagactctttcccaaaacactcctgcagtttttttcgttccaccggatcttccattacataaaatgcctgaatctccggatggtatttctttacatattcaaaaagcgcactggaattataattgaatgcccggttatgcactgaagagaacacccattttttctcattgggttcctccgaagtcgtaattctggcataactggttttcagtaaattctctatttttttcatcataaagacatattccttatttccttttccacaccattgctatacaggcaaacggtgccgataataaagcctgcattccttcttttaaaaatgccggatactgtcggtttctaagatacgtatacccaagtaccatatgatggcgcatacaaatttttcttttttctccccatctcatatctgcccaatatttctttttatgtgcaaataaccgattttcaccttcaatttttctttctcggctggacatcccctcagattctgtatgcaccagtgccttcacatcacatcttggaaggtaactgactgttccgtgattccgaatgactttctccatcagatagaattcatccccaaggtcaatcggtggaaatcctcctgacttcagcaaaaactccctttcgaacatcagtgtatccgttcctgtcatatgatacagataatgttttgccagcaaatgcttctcttcctgtataacccccgggttcagataatttcttttccgcacttcctctaatcttccatcctcgcgatacagagccagatcggtaatagatacatttgatttcacacactgcatatgacgcacctgttgctctatcttctcttttctgtatttgtcatcatcatcaagaaatgtaatatacatcccggatgctttttctataccacggtttctcgaggtcgccgaccctttattggtttcattcaccacatactttaaggaaatctgatatcttctctggaatccttcaacaattttctttactctggcattccattccgaatctgcattgtcatccacaagaataatctcctggttcttccatgtctgtcttgcaagactctccagtgcacagcttaattctcgctctctgcgatatgttgccataataaccgacaccagtggtgtatcatttactttcttctccgcaccttcctgaactccatctcttcttaaaacagcaagtaccgtcaggaacagacatttcagatccatccaggtactctggtgttctacataatatccatccagttttgctttttcggaaatactgatcgtatctcttccatgtatctgtgcccaaccggtaagccccggtaatacatcatttgctccgtatttctcccgttctttcagaaggtcgtactgattccagagtgccggtcttggtcctacaagactcatatctccttttaagatattcatcagctgtggcagttcatccagacttgtagctcgtaagaattttcctgatttcgtaatgtactgatccggattttccagaagatgagtcggtacatccttgggagtatctgcacgcatcgtccgaaacttcaaaatttcaaaatatttctgatgaataccaactcttttttggcgaaaaaaaaccggtcccggagaatctatctttacccatatcgcaattccagccagaagtggcgcacaaaatatcgttgccggcaccgtaatcacataatctaaccatttcctgttatctctcatcactctttaaaaaacggaaactgtggttctgtttttccatcagtttccgttctcacctccatacctttttggcgcttccacgcttattatttcttctttgatttctctcctgtttcctgatactgatatgtctctacaatttcttttaccgactcacgaatatgatttccatcctgataggcctcttttttcagttgttccaactgctttaaaaatttttcctgatcaaactccagaggctttccgataaaaattttttcatgtgcagtttttcgcaacccttcttcggccatcagaagctcctcatacagtttttctcccgggcgaagtcctgtatactggatcttaatatcttcatcaggtcgcaatccggagagcttgatcagatttcttgccagatcatcgattcgcatcggctctcccatatccagtacaaaaatctccccaccttttgcgtatgctcctgcctgtaatactaaagaaactgcctccggaattgtcataaaatagcgaataatatttttatctgttacagttaccggaccgccttcttctatttgttttcgaaacaatggaataacgcttccattacttcctaatacattgccaaaccgtactgccacaaattctgtctcacaggttgtattcagtgtctgtataatcatttcacagattctttttgatgctcccataatattggtagggtttactgctttatccgtagaaatcaatataaaacgtttacacccattttcagaagcagcccgtgctgtatttaatgtaccaaaaacattatttttgattgcttcatttggactattttccataagtggtacatgcttatgtgccgctgcgtgatatacaagttccggctgatatctctgaaaaatgctactgattctatgagtatttctcactgaaccgatcaaaaccaccagattcatttccggataatcatgtttaaattcctgttgaatatcatagactgtgttttcataaatatccacgatcacaagcaatgcaggatgatgtgctgctatctggcggcaaagctcgctgccaatagatccaccccctccggtaatcagtactcttttatcctgtacatattccagtacagatccaagatccgtctctacggggtctcttcctaacagatcttcaatttctacttcccgcaattttgctatgcttacttcttcattgatcagctgataaacccctggaagaatccgaagtttacagccactgtctttgcagatttccagaagagctttccgatcctttggaggcatcgtagggatggctataataatttcctgtaccttataacgttttacagcctctaaaatctcctctcttcctcctacgattggaataccaagaagtttcgtattctttttctgtggattatcatcgatcacacataccactttattacttaagtggtagctggattgaagttctttgataatcaacgttcctgcatcccccgctccgatcaccatggtaataataggtttttccagatgatctgtatatactttctgcttgaaaatacgaagcagtctatacgaaaatctccctgccatcataagtggtaataataccaacaaatacagaatataataggatcttggaagatggtatcccatcatatacattcccaccagttgaaacattgctgatactatacacgataaaaccaggtttaaaagttctgtaacactggcatatcgccacaggctctcatataaactgaacagtgcaaaaataatcagcgtacaccctatattaattggtgtataatgaatcatagactcaagaaatggtttccttatcattcccggatggaattcaaatcgaatcaacaatgccgtatactctgaaatcccaataacaagaatatcatacaatataagcaaagaaactcgtatacgttttttaggattttttaatccttttattgttcttatccacataattttctctattctttctgtcactaatcagaatcttttattcatctcattatacccttttccatttcagtccgcaatcccatactcctttttctcctgttttccctgtctttttaaggaaaaaacgacattctgtatcctttttgaacttttttcagttttttttaattttttttgacataaatgctgatttctccgtgttattaatataagaaagaacacatacagaccaacaacataatcttaagaaaggagatccctatggtaaatacaaaaataattgcagatcttccgattgaacttggaatcaaaagaacttacaaaggttactttttcctgattgctgcactggaactcgcaatcactgatcagaaaaatttactctacatgagtaaatctatttttccggttattgcagcacgttatggaactacatacagttgtattgaacgtaacatccgaacagcaatcaacgcctgttggaattcgccaaatcgtgaaaaactgctgacaatgtctccttatccactgcagaaagctccttccgtaactgcttttattgatattctgtattggtatctgaaaaatcaggaaggcggtagtttatattaaaccgttttgtcgatagtaaactggttccagtttattcatcatatttcaagagaagactgcataccctactcgataactgtagacttgtacaggttctaatctacagatctttctcgtctgacctgctcatcggaaacaaaaacatttctgtaatattctattgcatatagagaatttaaccgaaaagacattgtatcttttaggaacagttatttttttgaatatcaggaagatggtctggtaattttcattatctgaccatcttcccattgttctcacaatattttagctgtaacgtaagtgtcggaaatatagcaagtgctattctcgcgaagtatttttacgttgcgtataagaattccctgtaaaaggaaaaatgcttcaattcttagaaaagaattgaagcatataataatctgccgcagaccggaatcgaaccgttttaagtaatcaaaaatactgatagaaaggggctttggagacttcatcacggttgcggtgttcaaaaagtgttcaaacgtttgtcgcatacaaactaaaaagttgttactttctgcatagtgtatttcctaaaatgataattactacgacatcaaccaaaataatccccaatgcaatatatacaaaaaatgcaggcaaaatattttcaagcaagcccattgtcaatgcaagaattgctataatagacattccaattcccattgttctgcataacttcttttcatcatatttttccttttcttcttttgaagccgtattatatccggaaataaaccaactcccgtgtccagaaagtaaaataatagaaaatacagcaaatatcacaaagacaatccacactatccaatcagaacctgttgctaaatctactaatttcatttataagcacctccttaaattccgtttttcttaattcgatagtcgagtagactaagacctctcaatcttagcccctcacagatccgtacgtgcggctttcccgcatacggctcctcatagtaacattcgcttcaatataaacaatagtacgttttaggttttgctaacgggtaatacttgagcatttccacaaatccattccatgtgtatgcccgtctacaacctctccgattcatggctttgaatagaaactgttgtactctatgcaggaatgttgttatcttccgaaaattccatgtaacaccataataccgatagtgtccaattagttttacgttcaactctttaattatttctcgcattggtcgatttcgattatcgtaaatccagttcttgtatgctctaaccttttgctctaacttctttcttgaagtctgtacctttggcacgaaacctccctttcgagttttgctacaatagaaggtaaaccccagaaaatcaaatgtttcaggtttacattctcctcttgctctacgattctgctctgcaaatctcccaaattcaattagtctgcttttactactttccagctccagtccaaacttttccattcgttcctttaactctttatagtatctttcagcttctgacttatattgaaatcctgcaacaaaatcatccgcaaagttgacgagaaaacactctccctgcatttccctttgcaccaccagcttaaaccacagcgtcagcacatgatgcatgtatatatttgcaagcatcggactcattgctgagccttgtgccgaaccttcctctgttggctcgaattttccttgctccattattcctgctttaaggtatttacgtattagccacaataagttcttatcctgtatattccattcaaggaacttcatcatccaatcatggtcgatatggtcaaagaaacctttgatatcggcatctacgatatagctgatttttccatagcttatccgttggtatacttcttttattgcttcgtgacaccccctattcggtctgaatccatacatgcagtttaggaatctcggttcataaatagctcccagtattttcttcactgccatttgtacaatcttatcttcataggaagcaatccctaatggtcgtttctttccatttcctttaggtatatataccctcagtgacggaagtggcttaaaggatttgtttttcaacctctgtaccagttccttgatatttctatcaaggttcttcccatactcatccttagttaccttgtcaattccgactgctttgttcccatctaattccttatggcattgctttagcatatcttcatttatcaagtggtacactgatgtaaatataggatgttttgatgttgctgatatctcagctattcttactaatttcgtttccattatttcctccgtccctgagtacggataatgtgtcctcagtaagacctttactatgcaatccccttccctccatcggcattgcccgatttctacagtactatgggattgtccgaccacctaccattcatttgaaatactccgttttcagttgcaatttcatactcttcttcgagaaatggcaggttctccccagttgatgtgtattcacaatgtaaaacatgattggttctctgactccgcagtgccacataacactcgccatatcgcattacatgatattgtcttccgcaccagttaagacgtcgaccgactgaagttaacgtttcgaagctcaatcactattcaaccctgctttcttgctgtctacgcttgtcagatgccgttaccggcatcatcccaagactcgctattatctggttggctaaaccttggataaaccggaatcccaccggcttgactacacacccttagctgggcgcacaactggaatttatataattatccctctaactttcccattttacaggctttcccgcctgtccattagtaaaatgatatgtagtttcccttgtttttgcccttatgagataatcacaagggaaataagggaaattttttagtcattgcccaccactttatcaagaagccgaaccgattttcgtttcgcatctcttgtggagtgagcatagacgttcattgtggtactgacatctgagtgtcccaacaattcctgcacatcttttggggcagctccatttgctaaaaggttgcttgtataggtgtgacgtaactggtggaaatgaaagccttcaaatccctctaatgtttttgctacctttctgcataccgttcccaaagtagtcggaagttccagacagccatcaggtcttaagcagacgaaagaaatttctttataatctgccgggacttcctctgttctgtctaagcaataatactcgtagtacactctgtttttctctttgacctctttgtagtagttcgtgtgataaagttctccatactgcattcgattttttaactgctctttccgggcattacggaaaatctctaccagcgtatctccaaaatcaacaatcctcacttttttccgcttggttggtccgatgatatatttgcgctttgagccatcatatcggatgctgcgtcttatggtaaggcattgttcttccagatttacgtcctgccatgccaaaccgcaggcttctccaatacgaagcccggcataataggctatctggattggaagtattgcggctgggttctttttttgaagatacgcaagcagtctttcataatcttctcgtgaaattggttggatatttccgtccatgtcctcatccgaaaacaaatcaacttcgtccgtctgataccgcagtttaatatactgcatgggattgaacgtaatatactgttttggaaatactgcaaagcggaaggactgctgcatgactgcggaaaaagaatggatgtaatctttgctgtaaccctttctctcttttccatcgggatgaactcccccaaaggaaagcaaatcaaagaaggattgcaaatgctcagaggttacattttttaatttccgttctgccaatgggtgtttcttaatatttcggattgttccgaggtaattctccacagtaccattgctgagcgtacctgtttttaattcctcctctgcccacacatccagaagttgtccgactgtgagattttccgctttggcaacaaatttctttttctcataatcatccattgcctgacggagcagcttttcagtttcacttttgctttctgttccaacgcattctttctgaacaagattgccgcttgcgtcctctacatagaagcggtagtaccatttctttcctttttttcttacagatccttttgccataatcgtatatctcctttcgatattagacaatcggaactgatgaaatgcttcgtgcgtgtaagtatatcataactccggttgtcttactataccgattcggaatcttcgtataagacttctgataaaagatttgcaagcctttgttctgctgtttttggtttcttggaatagagccttacaacgtccgccatctcattaagagcattgatggtaggagtgatttcccttaagaacataatctcattatattcctcattcgattcaaaccctattgttttggcaatatccgtctgacctgcatttcccttgaagtttttgcaggcgaactggaaggaatccaaaaacagaccatattgttttaacatcagcagtaataaatcttttgaaaaagcatcttcttctttggtaagggcaagtggtaactgttccagaatatctcccatcgcatcacgaatctgtaactctctcttatccgtaatgtcggtttcatattcatctgtttcccctttgagccattccacagatacatggagtgcttccgaaagaccttccagcaccatttttttcgtattatcaatcgaaccattctcataacgcaggattgtagaagcagtaacacccatcttttctgcgacataaggctgtgtcagattcaattccagacggcgctgttttcttctgctgcctatcagcttgcgtaattctttatctttcatgctgactgcctcctttttcggtatgtatgaattatagcattgtttttccaaaattgcaatatgcaatacaaagtttgtttttaatatttcgtaacgcttgacaaaaagatatgaaaaggatatacttacatcacaagaattgcataatgcaatttataaggaggtgattatatgacgcaaagaaaaattgcattatccatcgaagaagctgctgactatacgggaatcggcagaaataccttaagacagcttgtagaatggaagaaacttccagtattaaaggttggtcgcaaagtcctgattaaaaccgatattctggaaatgtttatggaagcgaatgaaggtcgtgatttgagggatagaggaaatgtaaaagccgtaacaagaactgcggcaaattaaaaaggcggcttccaaagaaaccgccaaaggttctatcagaccgaagccatgatatacctacacgcaagaagattataccatgtgcttcttctgatacgcaaccaagaacttatgtttgcaaaagaaaggggaatgtaataatggcaaaatcaacaaaaagttatgaagaacgaatgcttgaaatggaaaagaaggaacaggaaagccttgaaaaagcaaaacgatatgcagcacagaagaaagaacttctgaaacgaaagaaagccgaagaaagtaaaaaacgaacccataggctctgtcaggttggcggtgcggtggaatccgttcttggtgcgcctattgaggaggaagacatcccaaagctgattggttttctgaaaaagcaggaagccaatggaaaatttttctcaaaggcaatgcagaaagaaacaaataccgatatggaggaagtgtaatgacggaggggatgagtttttcattcccttcattgctttttcatgaagggcgcacttatggacaaccagaggtcgtcccaataagtttgccacaagtggcaaccggtctgcgctcacgcttgccgggctcgttccgtcggcggggctttcagccagacctgctcatgccgcaggaggcactcttcgccagaggggcgcattccatgcaggctgctatgcgcagggcacccttacgcagagggcgttccggcaatactgctttttctaaaactgaaagcaatgttgccggaaatctatgccggatgtgcagaaaggaggaatccagacatggcgatttttcattacacagtcaaaatagtcggacgaagtaaagggaaatctgttatctccgcttccgcatatctcaatggggatgtgatgaaaaacgaggaaaccgggagaatcagttattacacttctaaaaaagaagtggtctacactcggctgatgatgtgtgaaaacgcacctcctgaatggcagatagtaccagaagaaaatataaaacgctttcaaaaatctgtccgatacaaaaggtcagaagataaagaagctgctttaaaaaaattcaaaatcacatttcagaaacaaaggttatggaatgaggtattgaagattgaaaaaagtgcagatgcccaacttggtaggtcatttgaatttgccctcccaaaagaatggagcagacaggaacagattcaatacacagccgactatatccaaaaaacatttgtggataagggaatgtgtgctgattggagtatccacgataaaggggatggcaacccccatgtccatctgcttctgactatgcgcccttttaacccggatcattcttggggaaagaaagaagtcaaggattgggattttgtcagagataaaaacggaaatatcgtgattgatgaatcccatccgaactggtggcaggataagaaaaaccctgaccgtcatggaatccgtatccctgtattagacgaaaacggaattcagaagattggagcaagaaaccgcctgcaatggaaacgggtgctgaccgatgctactggatggaacaatccaaaaaactgtgaactgtggcggagtgaatgggcaaaggtgtgtaacgaacatctgcctttgcataatcaggtcgatcaccgttcttatgaaaagcagggaaaactccagattcctaccatccatgaaggagctgacgcaagaaagattgaacaaaagtttcttgccgggcaggaaataaaaggctcgtggaaagtagcggaaaatcaaatcataaaacaacaaaacacgttattgcaaaggatactggacacctttggaaaagtatcgggtgcattatcattatggaaggagcgattaaatgacattagaagaaagccgggaaattatacccttaatggaatccatgatagcgtacatgtgcatatgaggaatgatacagtttctcgcagcctgtgttgctgcatgtaaagatattgtcaactgaatttttagatgttcttcgcgcaatttttttaattgattaactggaccaactgttgatacggtaatgccgtcggttggaaagttaagtccatttctatctcgaagaatatggattgctgcaatcaagttgtcgtaattgaataaaggttctcccattcccataaaaacgatacgatttactttttgacgtatcaatatgacctgctgcacaatttcagacggtgttagattacgaacaaaaccattgcgtccggactcacaaaaaatacagccaacagaacaaccaacttgcgtacttacgcaaacagtcccaccatctcgccgtttaataaaaaccgtttcgatatacctgttgtctttcaattcataaacatacttttcagtatcgctacttttatagactttttttgttgatattgatagattttttttgtgaaatggctgtttatataattccgtatataaggctcttgctttatcctctccaattacttccgacatttctttgtaagtaaatccgtatgggtcattcaatatttccgtaggtgtacttttaggtaagtgtttcatttaatatccttccttttcaaaattaaaaagtttgtttttcagagtttttgattatgatttctagtttttcaacatcaacgatatgcgttaatttacatttagggcagaaaagaggaaaatttcttaataccgtattataaaatacttgaaccctcgtctttccgttacaaattggacattttatccaatatttttcaagcataatatttctccttttgtgcaaaaaaatacaggtcaattctcaacatgagcattgacctgcatttatacatataacactacaacaaaattaaggcatagtttttatactatgtctatacatcgttagttttgttgtatagcatacgcaaaataagcatgacaaaaaagcccatattgaaaatgggaaaaatcttttttgatttcaatgcttatcgaatacgcatgctatgtaacataaacatttcccccttttaataatactatacaaaaaaagcggatagttgtcaacatatacatatgaattattttggctaactaatagaacagtgtagacatatccaagaagaaaggtgaacagtaaaatgtaatagggtgaataattatggcaaaaagaccagtaccaaaatacgacttcaaggcttttggggcagcgataaaggcggcgcggacagggcgcaaggagagccgcaagaaagtgagcgacgaaatgtttatctcgccgtgctaccttgcgaacattgagaacaaggggcagcacccaagtttacagattttctttgagcttatgctccgctacaatatatccgtagaccagttccttttggaaacgccgccggaaaagaacacgcagcggcggcagcttgacgcgctccttgacggtatgagcgataagggcatacggattgtgagcgcaacggcaaaggagatagcggaagtcgaaacagagggcagataagaggtgtccgtcacaagtgaacagggtatagagagcgttgtaatcttttttgaggattgcagcgtttttcttttgcgtaagtttggcaaaaccgggcatagctccgtagtaaggcataagggcataagggataaaaatattcatagcaagcataggaagcgggtacccacttccgtattttccccctcccgcgctgcggcgcgtcggttgaaaattgcttgttgggaagtgtcccaaaccctcggaacggaaaggaaaggagcgaagcaatggacggacggaaaaggacggtgcaaatcaaattcagagtgacggaagcggaacgggatttaatactggaaaaaatgaagctcgttcccacccggaacatggcggcatatctgcggaagattgccattgacgggtatatcattcagatagaccacgccgatataaaggcaatgaccgcagagatacagaaaatcggtgtcaacgtcaaccagatagcccgccgcgtgaacgcgacggggaacgcataccaagaggacatagaggaaataaagggggtgcttgcggagatatggcggttacaaagattaagcctgttaaaagcaccctaagcaaagcccttgactatatcgaaaacccggacaaaacggacgggaaaatgctcatatcctctttcggctgctcctatgaaacggcagatattgagttcggctataccctctcgcaagcactggataagggcaacaatttagcctttcacttgatacagtcctttgcgccgggagaggtagactatgagaaagcccatgaaatcggaaaacagcttgccgacgcggtgacaaaggggcagcatgaatatgttgtgacgacgcacattgataaggggcatatccataaccacattattttctgcgcggtgaattttgtagaccaccacaagtacaattccaacaaaaggagctattacggcatacggaacatgagcgacaagctgtgccgggagaatggcttgtccgtcgtcgtccccggcaagggaagcaagggaaagagctatgcggaatatcaagcggaaaagacgggtacaagttggaaaggcaagctaaagattgccgttgacgcgcttatcccccaagtttccagttttgaggaattgttgcagcggttacaggcggcgggctatgagataaagccggggaaatatgtatcatgccgcgcccccggacaggaacgcttcacccgcctaaaaaccctcggcgcagactatacagaggaagccataagggaacggatagcgggcagacgggcaaaggcggcgaaagcccccggagagcagcgcggcgtttcgctgcttatcgacattgagaacagtatcaaggcggcgcagagtaagggctacgaacaatgggcgaaaatccacaatctgaaacaggcggcaaagaccatgaatttcttgacggaacacaagattgaacagtacgcggatttagtcagccggattgaggaaatggcagcggaaagcggacaggcggcagacgcattgaagaacgcggaaaagcggcttgcggacatggcggtgcttatcaagaatgtttccacctaccaaaagacaaagcccgtctatgacgcataccgcaaggcaagaatagatatggcagttcaatggcttccaaccgcaattatcattttcttcgcctatatgattatatttggtggagttataggaacaattttcaagaaaagagatattacataatgcagggagggataatgttatgagtgtggtacttcaaatatatgctatcattgtgacactatctcttattattgttttatcattttacttgtttcatcgtagggaggtaacccggttaagccagaaattgcaaacacttttacattcatttacccatgcggaattgacattagattttccttcttccgatataaccgatcttgtaaatgctttaaatgaattgcttcgagtttaccacaaacaagtatattcattacaaaaaaaggatgaggcaatcaaagaaacaattacaaatttagcccatgatcttagaacacctgtgactgctattcaaggctatacacaaatgcttctacaatcacctgagttgtccgaggaagatttagatgcagcagttattataaacgaaagattgaatgttttaaatcagttactaaatcagttgtttgaatttgcacgaatagaggctgatgaaatggatttttcttatactacatttgatttaaatgctgttttacgctctgttgcagtttccttttttaaatcttttgaggaacgcaaaatcattccagtattaagtattgcagagatttcttttccattttatggagatgaaaaagcagtaaccagaatttttgaaaatatcatttctaatgccttgtcacatgggaaaagtgattatcatttttcatcttatgatgataatgaaaattaccatttttcttttcagaattttacagacagcataaatgaatctgatatagacaaaatatttaatcgtttttatacaacagatttatcccgttcccgcaaaacaaccggtttgggtctcacaatagcaaagaatttaacagtaaaaatgggcggttctatcagtgcttctctaaataataatgtttttgaaattgtagtgtgctttcctaaacaaaaaggataaaaaacttgatggcggtttcaaatccgccatttttcgtgcaaataatattctaaaacaaacatggtggcgtaggaggatactcgttcaaaggaataatatcaataaatgaattatgaatggtcctactaagaagaaaagcggcagagatttctcccctgccactttgattatgtaaaaaatatctgtgttaacgagtcggtagtgtaaaatagtttgtgtttttggtaaaaaataactcctttttggtaagaattcagatatgacaattcttatcgaaaaggagtattttttatggcagttgcaaaagaacaaattcgacagatcatctcagaaaacaacattaatagcgttgcagatatatacacgcttctgaaagacagtttcaaggatatcctgcaggagctgatggaggcagaactggatgcaactcttggctacgagaaaaaccataagggagatctacagacggacaataaaagaaatggtcattctacaaaaaacttaaagagtcaatacggtgaatttcaaatcgacgtaccaagagaccgtaacggtgagtttgaaccaaaactcatccctaaataccagagagatatttccgggattgaggaaaaagtgatctctttatatgcccgtggtatgagtacacgtgacatccacgaccagctccaggatctttatggaattgagctatcagctgaaatggtcagcaagatcacagacaagatacttcctcaggttaaggaatggcagtcccgtcctctgaacccggtttatccgtttgtctttatggactgtattcattataaagtacgtgaggatggcagaatccagagtcgtgctgcgtatgtagttcttggcgttacagtggagggatacaaagatatcctcagcatcacagtaggcgcaaatgaaaccagcaagttctggcttgggatgcttaatgatcttaagaaccgcggagtaaaagatgtccttttcttctgcgtggatggtcttccgggttttaaagaagctattcaggcagtttatccgcaggcagagatccagagatgtgtgatccatatgctacgcaattctttcaaatatgtaaattataatgatctgaaaaagttttcctcagatttcaaagaagtgtacaatgctccgaacgaaacagccgctttaacagagctggagaacatgaaagaaaaatgggggaagaaatatccgtacgcgatcagtaactgggaaaataaatgggaagatgtaagttcctttttccagttttctaatgatatcagacgcattatgtacacgacaaatatcatagaaggattgaaccgccagtatcggaaagtcacgaaaacgaaaagcgtattcccaagcgattctgcattggaaaagatgctgtatcttgccagcgagaacgtagtcaaaaagtggacgcagagataccggaactgggatcaggtattgaatcagctgatagtcctttacggagaacggcttactgcttatctgtaagagaaaagaaaagcaggaatggggaagctcttttaagccccgcattcctgctctctgtctattccttcggcatttatattattgccagaaatttccgatcctattccagaggtcgggtgtgggcagagcccacaaaaggcaataatcatgatgccttacttgtcatgcaaaaaaatcgaaaatgatgtatataattttcctacatggcaatactgtaagtacaaagatatattcgacagccgcataatcattaattcgacagcaaaattttacatatctatttcttatcagaaagatttactttccatagacacaagaatttttacaccctcaacgagtctcttgccttgtttgcatctcgttcatttttccaatcaaaaatcagatataaacttttgtttaaattgcctataattcaagtgaatcttctgcatccacccacatctgtaaattaccattaagatataatctcgcatattccaaaggttcatccacagccaatgaagtaagcgcacattctgatccatatgtggtttttaaatctttttcagcttcccagcaatcaatgcgaagcatatatccagcacttgtgtaaacatcaatactatcgtggtttatgttgtattctgcataaattgttctcatcgtatcttatctccattttcttttaatcatcagttacagagttaaatatcgaaaacatttcaatcagttcaccatgtcattattgttatatgttatactgtgttatgaaattttctttcccttaatttttcccatattaaggttcatgaaagccaatgggagaatataacgcaagggaaagagtaagggaaagttcacttgctacaaacttagtattttcaagggtttatgaggaatttgataatcaaatataacagttattaaatatcctaaaataagtgaaatatcaactgaaatttataacagtccttctgcttttacccgaattgcataaaactcttggaatgtatctgattcgtccattattgtttctttcataatttttaatctccgtttaccaactcgtctatccaatacagcaaatatttttacgattaaattttcacttttaaggcttgtttcaatatcttgattatcaaactctgcaaatgcattataaaaacagcgttggtcaaaaattcccaattttatagctacatcgtccatatacgcattttctacttttatgcgtttctcatatttttcgtcttggggaaacatgcctgctttcgaccaattgttccaatagcatcctttgatgatttcttttccatcatatcttattgccgcccgtccctcatggtcgggactcttactatatgatgttacataatactgaatatgaccttgcagactttgagccagatattccgtttccaacttttttcttataccactccatgttgccattcattattctccccaaataccgatttgtctgtttcatgttatacacagtataattccattttataaaatattcaattaaaaaggtatgcgaatattttttattttcgcatacccttttatcactttattcttttacatatcgaattaactcaccaatttcacattcaaaatagttgcatagtttacagattaaatttgcgtccagtctttgaaattcatttctgcaatatctattgaaatttgaccttgggatatcgagttccttacaaatcatattcttactgatacctttttcttgtaacagttcttctattcttaattctaaatgtccataattcatgttccgcacctctacataaagtatatttattaaatctttatgtagtaattcactatatagtgaggtactatatagtcagtcccttgttaataacacaaaagaggtatgtacatgaaaaagaaaatcatagcaacaatcacaatgctctgtttactgaccgttctctataattatctcagactgccgggctatcatattactaacagcatatcctttagcagtgcagataccagagatactgaattgactgtaattgtttacaaatgttggggaattgatggagtaatcaaagacattgaaaacgaacataacaaaattaacggtacacctaccaccttggaaatcaacctctattatccaacttattacttgcacaataatagcaagccgttccgaactgtaaccattgaatataataaaaaggaatagcactctattactgcttttgaagtagtatcggctattccctctccttatattcttttgttcgtattttcgcaaactaacgttccgcaaggatgcccagtgcgacggttcctaacagggcggcgggtcgactgggcaagtggtcggctgaaaagcattttctactcaacgacatatttaacgtttgattctctccgtccctcatatttcttctttgccaacagtttatcaagaaattctgacacttcttccatgtcttcactgtctatcaaatccagttttatcaatacatcaaggtctgtctgattcttcggttgtattgagatcggctgagatgtatccacaaccactttcaactgttttgtcttatttgctgtttcaatatccgtagttaatcccataacgtggcttttactcacgccgaatatctgtgataatttttcccatatagattcatctctcggcgttccgtttccattttcatagttcgtaagcatactttgtgaaatgcctaattcttttgcaagttccgcaacggttatattcttttctttccgcaattcttttattttattcatagcgaacctcctttataagcacattatatttcatcaaattttctctgtcaatctttttatcggatattcagatattttctattgacattctgcaatgcttgttttatcataagattatcttaatatctgataatcagatatctataaggaggtgaaacgatgattagaggaaatgactttattttaaatccagacaaactgcaagaggaatttcagttagtagaagtttctgactgggtagacttttctacaaaagaaaaattaggattctactatacagttcttcttccaaaattaaagtttgaaaaagtcaaagtaggcattaaagctaacacagcgattgttaccaacgaagaacttgaacaaaaagggcagattccagtctcatttgatggattacatacttgggctagtctctataatggacgtctttctgtcaaagcagaagcttccaatatcagaaaagtgggaatgaaataatttccctactatgtcagccagtcagtgccggacaacgtcataggtgctgaactggctgacctctatacttgatatataaaacaacatcttccgaaaacaatcggaacattcattacaaaaattgggatatgaggtgagattcgtgagcaaaacaaaagagtgttttgcatacaatacgaaaatcattgaaactcctactacaaaagaagtatatatttacgaaaaccctatttttattcactcgaaagaaaaggcagatttaacagacacaagtaaccgaaaaaaatttgatgaaatgtcagctcataagcaatatgatagtttaaaacgcaagcagaagcattacgaacaggctcgttgggatattgcccgtattgttgactgcaactttgataacaaaacaaaatttgtaacgctgacatttaaagaaaacattcaggaaatcctgataactaaccgagaatttaagtattttatccagcgattaaattattatttgtaccataccaaaacccagttattaaaataccttgcaacgtgggagaaacagaagcgtggagcaatccattatcatgttattttctttgattttccgtatatagcaaaagaaaaattacagaatttatggtcacatggatttattaaaatcaatcgcattgatgtagacagcaaagaaaacagaggtcgttatcttagcaagtattttggaaaagaccttgatttgaaagaacataagaaaaaagccttttttaaatctcaaaatctgaaagttccacacgaaacaaaagtcatgctgaccgaagacattttacatgacttacaaaaagaaaatatcgtctttcagaaagaatacacaaggcaaatttacgataccaacgctttcttatctgctggttcatgcttaaaggacagccgtgttatctacatcaaaataaaaaaagaaaatccttgcgtaaagggggaatcttatggataatcccgttacgttctcagatataacattattgaatacgttagccacctgtgctaacatgaccacagatgaagtcttcaaagattttaaaattatggcaaataaaaaaatcttggagaatcacaaatatgaaatttattactcagaatcagaaaaaagctggcgtacttatttacccgatgaaaccaaacctaacaaacgccgtcctgttaagaggaagagtaaagagaaccttgaaaaagaaatcatcagattttatattgaaaagcagaaagctgaaaaccgtcagaatatcacactggaagaattatatgctgaatggcttttgtataaaagagattatacttccgtaaaagcaaaaacaattcaagaatatgtatctgaatggaatagatttttcaaagatacagaacttgttaaaatgaagataggcgaaatcaaaccaatcacgcttatccgctttttcagagaagctacaaaagaccgacagttcacgcacaagcgagtcagtaatgcccgttctgttttgaatggaataatgagttatgcgattgaagaagaaattatatcacataatcctgtctctgatgtgaatttcaaacagtttacctataagccagtagaagtacaaagtgacaatgtattttcccgtgatgatacgcataagttattaaattatcttcggtgtatcatagagccatattctcttgcaatacagttatctttctatctttttatccgtgttggagaaacaaaagctatccgttgggaagatattgactacaataacaggcttgtatatcttcatagacaggcgacctgtgaacgtacattgaatgatgatttaacattctcaagccgaaaagtaaaagtagtaaatcaaatgaaaggaaatacttctcatggattccgtaaacagttccttacagacgaagcacttaaaattcttcacaaagcaaaggaattaaatccaaatggaatatatgtctttgaacccaacggcgagattatgacaacagacagctttaatcgccgtttgaagaaatattgcaaagaagccggtgttccttatcattccagtcataaaatccgcttttacaatgcttcaacagcttttgacggaaataatcttacaacccttagttatttaatgggacatagtgagacagctacaacattgcattacttgcgaaatgtcaataagaggaagaatgacaggcttgcttttcagaatcttggtatttcatcataaagtgttcaaaggtgttcaaacattttaaaacaaaaaaataagagaaacgctgtaaattcaacgtttctcccatttttaactaatgccgcagaccggaatcgaaccggtacgggtatcactacccacgggattttaagtcccgggcgtctgccagttccgccactgcggcatgtaattttatttaaaaaacaaaaaatgggacctacagggctcgaacctgtgaccctctgcttgtaaggcagatgctctcccagctgagctaagatcccataatttatacataagatacacaatagcctttcgactgtcgtccacttatgaacgacccagacgggactcgaacccgtgacctccgccgtgacagggcggcgctctaaccaactgagccactgggccatgtgtaattaaaatagcaaaatggaccttcggggactcgaacccaggaccgaccggttatgagccggttgctctaaccaactgagctaaaggtccataaccatctttccaagacaattgatggaagccgatgatcggactcgaaccgataacctgctgattacaaatcagctgctctgccaattgagccacatcggcatgatgaactcaaaaagtaggttgctatcaaagtgactccgacgggaatcgaacccgtgttaccgccgtgaaagggcgatgtcttaaccgcttgaccacggagccataactcccccagttggactcgaaccaacgacactgcggttaacagccgcatgctctaccgactgagctatggaggatcattctctttctctcttttctctccatgtaccttcaaaactgcacacacgtaacatccttcttcctactgctttgcgatcgaccgttccaggtcaaaccctcgaccgattagtaacagtcagctccatacattactgcacttccacctctgccctatctacctcgtcgtcttcaaggggtcttacttctttcgaatgggatatctcatcttgaggggggcttcacgcttagatgccttcagcgtttatcccttccggacttggctaccctgccatgcagctggcactgcaacaggtacaccagcggtccgtccatcccggtcctctcgtactaaggacagctcctctcagatatcctacgcccacgccggatagggaccgaactgtctcacgacgttctgaacccagctcgcgtaccgctttaatgggcgaacagcccaacccttgggacctactacagccccaggatgcgatgagccgacatcgaggtgccaaaccactccgtcgatgtgaactcttgggagtgataagcctgttatccccagggtagcttttatccgttgagcgatggcattcccacttaataccaccggatcactaagtcctactttcgtacctgctccacccgtcggtgtcgcagtcaagctcccttctgcctttgcactcttcgaatggtttccaaccattctgagggaacctttgagcgcctccgataccctttcggaggcgaccgccccagtcaaactccccacctgacattgtcccccagccgggtcacggctgctggttagaaacccagtactgcaagggtggtatcccaacaacggctcctcggcaactggcgttaccgattcatagcctcccacctatcctgtacatgcaataccgaatcccagtatcaagctggagtaaagctccatggggtctttccgtcctggcgcaggtaaccagcatcttcactggtacttcaatttcaccggatgcattgtcgagacagcgctcaaatcattacgcctttcgtgcgggtcggaacttacccgacaaggaatttcgctaccttaggaccgttatagttacggccgccgtttactggggcttcaattcaaagcttcgcttgcgctaacctctcctcttaaccttccagcaccgggcaggcgtcagcccatatacctcacctttcggttttgcatagacctgtgtttttgctaaacagttgcttgagcctattctctgcggccacatttctgtggcaccccttctcccgaagttacggggtcattttgccgagttccttaacaatgcttcttccgtcggccttaggattctctcctcatccacctgtgtcggtttacggtacgggtacaataagaacaatagcggcttttcttgacgcatggctcacatacttccctactagatttcggtccgcatcacgccttcggattgccctgcggtttttcctacaggactcctacctcgcttgcacgcggctttccattccgcgcctatgctctccacacgtgtccccacagttctgtcttactgcagtacaggaatctcaacctgttgtccatcggctacgactctcgtcctcgccttaggccccgacttacccagggcagatcagctttaccctggaaaccttagatattcggccgagaggattcccacctctctctcgctactcattccggcattctctcttcgatacactccacagctccttccggtactgcttcgttgcgtatccaatgctcctctaccaatgtcttcagacattcctcagcttcggtgtcgtgtttcagccccggacattttcggcgcaggacctctcgaccagtgagctattacgcactctttgaatgtatggctgcttctgagccaacatcctggttgtcttcgaaatcccacatccttttccacttaacacgtactttgggaccttagctggaggtctgggctctttcccttttgactatccaacttatctcgtatagtctgactcccgataagcatctacacggcattcggagtttgatattcttcggtaagctttgacgccccctaggaaattcagtgctctacctccgcaagactctatcgaggctagccctaaagctatttcgaggagaaccagctatctccgggttcgattggaatttctcccctatccacacctcatccccacccttttcaacggatgtgggttcggtcctccattgccttttacggcaacttcaacctggacatggatagatcacccggtttcgggtctactctgactgacttttccgccctcttaagacttggtttcccttcggctccacggctctaccgtttaacctcgccagccagcgtaactcgccggaccgttctacaaaaagtacgcggtcgcactcataaggtgctcccacagcttgtaaacacagggtttcaggttctctttcactcccctcccggggtccttttcacctttccttcacagtactatgcgctatcggtcactaaggagtatttagccttggggggtggtccccccgacttcccacaaggttccacgtgtctcgtggtactctggatcctgccgtcccggtccggatttcgtgtacggggctttcaccctctctggctggctttcccaaaaccattccactatcctttctggtaacttatgcagtccataaccccagcatgcacgcacgctggtttaggctcctcccatttcgctcgccgctactctgggaatcgagttttctttcttttcctccggctacttagatgtttcagttcaccgggttcccttccatacgttatggattggcgtatggatacctggagtctatccaggtgggtttccccattcggatacctgcggatcaatggatatttgctcctccccgcagcttttcgcagcttatcacgtccttcatcggctcttagtgccaaggcatccaccctgcgctctttcttgtttgaccttccagttttactagcgtttaaaactggcggttctctcgcagtttcatttcatcgtgtttacaatgtaatgagtagttattgttttgattcgttatccttaaaagataactcctcggatgtctctttttcctatctctaaacgtttaacgtttttttggattatttcgtatatgcagttttcaaggtacatgttcgctccgctcacatgtagatcgcacagccttcggctggcgcctggccaactcgggatctgcttcgcagacacctcgcgggatgttcaccacggaacgttttctttattttactaaagatttatgggctttaaaaatatgacttaaaaccctatgggcttaagtggactcgaaccaccgacctcacgcttatcaggcgtgcgctctaaccagctgagctataagcccacagtggagatgaagagattcgaactctcgaccccctgcttgcaaggcaggtgctctcccaactgagctacatccccgtagatctggcatccacctgctctcccacaccgtctccagtgcagtaccatcggcctcttgggtcttaaccgtcgtgttcgggatgggaacgggtgtgtcccccaagcgcatcgacgccagaaatatcgttatccaattatgagtttccatattgataactcaacagtaaaacacattcatctactttgtcttcccttagaaaggaggtgatccagccgcaccttccgatacggctaccttgttacgacttcaccccagttatcggtcccaccttcgacggctcctccctttcggttaggtcaccggcttcgggtgttactgactcccatggtgtgacgggcggtgtgtacaagacccgggaacgtattcaccgcagtatgctgacctgcgattactagcgattccagcttcatgtagtcgagttgcagactacaatccgaactgagacgttatttttgagatttgctcacactcgcgtgatcgcttccctttgtttacgccattgtagcacgtgtgtagcccaaatcataaggggcatgatgatttgacgtcatccccaccttcctccaggttatccctggcagtctccacagagtgcccaacttcacttgctggctactgaggataagggttgcgctcgttgcgggacttaacccaacatctcacgacacgagctgacgacaaccatgcaccacctgtcttctctgtccccgaagggaaaggactcattacagtccggtcagatcgatgtcaagatttggtaaggttcttcgcgttgcttcgaattaaaccacatgctccaccgcttgtgcgggtccccgtcaattcctttgagtttcattcttgcgaacgtactccccaggtggaatacttattgcgtttgctgcggcaccgaagagctttgctccccaacacctagtattcatcgtttacggcgtggactaccagggtatctaatcctgtttgctccccacgctttcgagcctcaacgtcagttaccgtccagtaagccgccttcgccactggtgttcctcctaatatctacgcatttcaccgctacactaggaattccacttacccctccggtactctagattgacagtttccaatgcagtcccggggttgagccccggcctttcacatcagacttgccattccgtctacgctccctttacacccagtaaatccggataacgcttgccccctacgtattaccgcggctgctggcacgtagttagccggggcttcttagtcaggtaccgtcattttcttccctgctgatagagctttacataccgaaatacttcttcgctcacgcggcgtcgctgcatcagggtttcccccattgtgcaatattccccactgctgcctcccgtaggagtctgggccgtgtctcagtcccaatgtggccgtccaccctctcaggccggctatggatcgtcgccttggtaggccgttaccctgccaactagctaatccaacgcgggtccatctcataccaccggagtttttcacactgtaccatgcagtaccgtgcgcttatgcggtattagcagccatttctaactgttatccccctgtatgaggcaggttacccacgcgttactcacccgtccgccactcagtcactaaggacttcatccgaagaatctgtccaaagtgcttcgttcgacttgcatgtgttaagcacgccgccagcgttcatcctgagccaggatcaaactctctaaataaatgtttgctccaggtcaaaatcaactcttggctaatttatcccttttactgttttttaaggatctttcgatcgttcgtttttatgattttaaaaagaactttcgaggaatgtgtttcactgttcagttatcaaagatcagttttgcattgccgtttgtctcaaacagctttgctattatatcatgtcgtttcctgcctgtcaagaacttttttcaactttttttcaacttttttgaagttgtttttatttctctctcgcagcaacttcggtagtatatcatgcctaccgcttagttgtcaagaacttttttcttgcaacttttcggttttcaccgaacggagaaggagggatttgaaccctcgcgccgctactaacgacctactccctttccaggggagccccttcagccacttgggtacttctccaaatgcctgatcaaaagatcagttttttcttttgtaacggagagggtgggattcgaacccacgcgccctttcggacaaacggttttcaagaccgcctcgttatgaccacttcgatacctctccatatctctgtagtggtctgcgctttcgtctcgctcgaagacaagtgatattctatcatctgtttttcaatatgtcaatatacttttttcattttttttacttttttttatcatatgtttcacggacaaatatttcaccaatttcaaggtcttccggtgtagtaatttttatatttttataagatccttcatataaccatacctcatgatttccataatcctctaccaccatagcatcatctgtaattctgctgctgtcatgcatcagtgctttttcataagcttcttttatcagatgatactcaaatatctgtggtgtctgaacattccacacatgactccgatctggtgtagataccactttttttccttcaccaattatcttcactgtatctttggatggcacacctgctgcacatgcctgatattctttcgcacagtcaaggcctcgctgaatcagttcttctgtgacaaatggtcttgctccatcgtgaatcagaacataatctgttttgtgacaggcacaaagtccctgataaaccgattcatatctctcttttccacctgcaactacttctgacactttatcaatatgatacttctgcacaaatgcatctttacagtaattgatttctgttttcccacacaccagaacaatgtctgtgatttccggtgaatcctgaaaagctttcagtgaataatacagcaccggatattctcccagctgtaaaaactgtttctgtacattagttttcatcctttttccctgacctgctgccagaatgattgctgtacatttcactggtatcaccttcctttcttaccgttctcccagtttcagatttggaactgcattcagatcccatccgtgacgcacaccttttttgtattcgtaataagccgcaacaccaatcattgccgcattatcggtgcagaagatcggcgatggataataaaacctgatatgttctctctcgcacgcttctttcatcgcctgacgcaaagcactgttggaggcaacaccaccagcaatggccagtttatccatatgatgctcttttgccgcctttaccgctttttccaccagtgtatctaccactgctttctggaaagatgcagcaatatctgcctcacagatttcttctccctgcatcttacatcgattaatatgatttaaaactgcagattttactccactgaaactgaaatcataaggatcttccagttttgcctttggaaatacaatggcattcggattcccctctttggacactttatcaatctttggtccgcccggatatcccagaccaatggcacgtgctactttatcaaaggcttcccctgccgcatcatctctcgttcttccaagaatttcaaactctccgtaatctttgacgatcaccagatgggtatgtccgccggatacgatcaggcacataaacggtggtttcagatccggatgttcaatataattggcagaaacatgtccctcgatatgatgaactcctatcagcggcagttttttcgcatagctgattgccttcgcttctgccactcccaccagcagtgctccaacaagacccggaccataggtaactccgacagcatccagatcctccagcgtaacatctgcctctgtcaatgcctcttctactacctgatttattttttcaatatgttttctggatgcgatttccggcaccacccctccatacagagtatgcagtgcaatctgagaagaaattatattagacaaaatggttcgtccatttttcactacggaagctgccgtttcatcacaggaactctcaattgccagaattaaaacatctttctcactcattttcttcctcctcaaataacaaatccacggattttccatcttttccaacataactgttcgggaaaatctctcttacaccatccatatattcttccggatgtaccagagagggactgaaatgtgtcagccacatttcttttacctgtgcttttttcgcgagttttgccgcctctttcatcgtcatatgcttgtattctctcgcttttgcgtctttttccggttctccgtacattccctcacatatcagcagatccgattcttttgcatgttcttccatcgataccgtcggacgactgtccgtacagtatgtgactttcagaccttttcttgccggtccgagtaccatatccggtgtatacacctttccgccttcctcgatggactcacctttttgcagtgggttccagtatttcagtggaatctcgttggcttttgcctgttccacagagaattttccaccacggcgaatctctacggtatagccgtaacaggtcacattatggttcacccgaaacgccgtgatctcatacccccgaacggaaaatttttcttcctgcccctgaatttctttgcaaataattggaaatggaagttccggagcaatggtacgaagagcattaaccacccgttcaagtcctttcggtccgatcagtgtcagtggttccgtacgttctgcatttcccatagtcagtaacattcccggaagaccactgatatgatctgcatgataatgagtgaagcagatcacatcgatcggtttaaagctccatcctttcgacttcactgccacctgagttccctctccacagtcgatcatcagactgcttccgttatatctggcaaggaaggaggtaagatatctacgtggcagcggcatcatcccacctgttcccaataaacatacatctaacatcgaatttttaattcctctatctttcttttccaactgtctcatgcatcatcagtactgcatgttccacaggatcctcataataatttttccgtaagccatttttcacgaatccggctttttcatatacatgaattgccctttcattgctctcgcggacttccagaaaaagacgggacactcccatctcattcgttattctgatcagctcctgcaccagaagcttgccggtaccatggttctgcctgtcttttttcacagatacattcgtaatatctccttcgtcctgtaccatcacaacaccacaatacccaaggatctcttctccttccgccgctattagaaataacgtatcctgacggatcagaaaagtaaaaaaacctgtttctgtccacgggcgggagaaattctcattttcaatcttcatcacctgttccagatcatccagctgcatttcccgaattttcattatttttttcctgcttctctttccgcacgctcccgctctgcctgagatacccgaagatattccggctgatgctcggctgctgtcactgtcttgccttgctggtaatatttttctgccaatgctcccacagctcctgcacgctgtttgttcagatgtgccggtgcaaaactgtacggtacctgcatattttcttttaacatctcctgataaaccgtaacaccgtctcccagaaagatcaccgcttctcccaatgcattcagttcccggatcagttcttccacagcaattgctttctgtctgctcactgttaccagttcgtgatctgcaaagcggtagattccggtgtagacctgttttcttctcgcatccatcatcgggcagatcacacctgtagaatcatacagattatatgccagtgcgtctactgttggcaccggtatcagcggtttctttaatgccagtcccagtccctttgccgtagcggaacctatacgaagtccggtaaacgatcccggacctgctgccactgcaatagcatctatggtttccagatccagttcgatcatcttcgcgatctcatcaagcatcggaagcagggtctgagaatgtgtctttttataattcaccgtatattctgccaacagctgattgtcttccacaactgcgacagacgctaccagtcctgagctgtcaagtgctaatattttcatttgttctcccatccttccagaccggtaatggtgatccgacggtaatcaaatcctttttccaggtctttctcaattgttacatgaatactgttttccggaatcagttcttcgatcagttccgcccattcgatcatacacacaccatttccgaagaaataatcatcataaccgatttcttccatctcttcgatatctccgatacggtatacatcgaaatgataaaaaggaagtcttccctcttcatatacctgtacaatggtaaatgtcgggctgctgaccgcttctgtgattcctagtcctctggcgattccctgagtaaacactgttttcccaacgccaaggtctccatttagggtatagatttgtcctgcttttgcctgttctccaagtttctgtcccagtgcaaaggtctcttcaggactgtttgtttctattgtcattgttttcctctttctttatttcagacggatcttcagttttcttgcatccacatgttttttcagaagttccatcagcttcggataatttttaccgactgctgccttgggccatacatatgcatctgccttgttgatatagacatacagacataactgactgtcaatcaccttttccacctgagcccatttcagatgtccggtctgcgcgttctggatcgtggtgattccggtactgtctactttgtaagtaaatggtttacgatacactggtgttcttttgaatccctgatccgccttgatccaaagttttcccggcatcaggagcaggaaaaatacagcaaaaaatatataacacacgctgaacattcttcccactcggttccaggtaagcacacacagtggaaccatcgcaagtcctgccagaagactgagttttccacgcagggtccggtaggtatgctgcagaaagaaatcaaacagatactgtctgctcatctgcacattaaattgtaatttcacttctgttctcctttaatttctaatctttgcacattatagcataggaatcttattcccacaagaaagggtctattccggcatggtaattgtatgctgtgtcacgctgaatgttgcttttccatcgctagaaaatacgatcccctgcgacttcaaatccgtatagatcagtgttgtcatcgcctgtttaccatcatttgcaaatacttctattgtatacttatccatcacaatcctgaatttgatcgtttctttctcatttgccaccttcatactgcgactgcagatcacatctcttaccagaccggaatacgtacgatccacggtaaataattcctggtatctgttatagtacagttccgtataattttcatcatcgcaggcaagcaaaatggaaaatccttccagatcctctttttttacttctaccgtcatatcaaaacttctgcctgtgattccgtccagttcagcagactggttttccagggtgacattttcatagttgcgctcgccggtataataattttcaatctcacgtaccggaagctgtaccaggctgccgtcttccacatggagttctctcggaatggtcataagaccggtccagtccatatcttccggagtcatgaaattatcccagctctgcagccatgcaatcataactcttcttccatcggttgtttctaccgtctgcggtgcataaaaatccataccatagtccacctgtctcgcatcgcctctggtataagtcatcgtctctttctcataatctccggtaaaatagatggaattgtttccattatgaaactccagtccttctgctctcataaactgcggagatacgatcagaacctgacagccgtcaagtgcaaagaaatccgggcactcccacatttttccatagcggtttttacactggtcgatcattttctcgtaattccaatggagcgcatcttcagatgtaaatagtgccagctgaccgcttccatcctctgccttgcttccgatcaatgcatagaagcgtccgtcttctttccagatcttcggatcacgaaaatccaccggggagcttccttccggcaggcagtctgcggtgatcaccgggttttctgccactttttcataattttcgccgtcaccgatcgcaatgctctgtgtctggcgtaccatatgtgtgccatcctccagatctttttccagaacactggtatacatcagaatatgttttccttcatgttccactgctgttccggaaaaacatccctgaccatcgtattccatatccggtgccagcgcacatggaagttcttcccatttgataaaatcttttgtcctacaatgtccccagtgcatcggaccccatttattttcatatggataatactgataaaacagatgatattcctcaccaaatcgggaaaatccgttcggatcgttgcaccagccgattgtcggcgttacatgaaatgccggacgtttatcctcatctctctccttctttttctttgcctcatatgcaattgcttttgctaatttttcagattgtttattcattaattaaacctctctttgctgtcattttttgattctttgattcatcatacaattatctttattttatcttgtcagatgcgtttcgtccagctgttttcgtacctgctcagtatcatcacagttactgtttttctattgtatgtttcagatgacagatcgtttctgtgtgaaccgtctgtgcaaactgatcgacacatacgcaccgctccacgcgatagccacgccgtaaaaagatttccagatcccttgcaaggctggtcggtttacaggaaatataaaccagattatccacctggtattcgatgatcttcggaagagctttcggatggataccgtcccgcggcgggtcaagtacgataaaatccggtttttcttcaatctcatcaagcaccttcagcacatcaccggcgataaactcgcagtttttgatgccgtttctctcagcattttccctggctgccacaacggcttcttctacgatctccacaccaatcacctttttcgccactgctgccaggatctgtgaaatcgtaccggttccgctgtagagatcaaagaccgtcatgtctctggtatccccaatatagcttcgtgcagtttcatacaacacttccgcgccgagagaattcggctggaagaaggagaacggcgtgatcttaaacttcagtcccagaagattttcatagaaataatcttgtccatacagcactctggtctcatcactctgtacaagatctgccagtgaatcgttcagaatatgcaggattcccacgatcttcccttccagagaaagcgccataagacgttccaccagttcagaaagatcaggattcagctgcgtagtcgttaccagattgatcaggatctccccggtcgtatttccccgacgcagcagcagatgcctcagatatccctcatggctcatcttatgataataggtaaatccctgttccttacagtaatccagcacacaggtcagaatcttcgtcagatcttcatgtaccaacttacagtcggatgcggtcagcacatcataggtacttccctttttatggagtcccagtgtcagcgggccgtctttttcggcatctccgaacgagaattccatcttattgcggtaacagaattctgtaggacttcccttgattccctcaaaaacataatccgggtttccgttttcatccacctgcccaccgtttttgatcgctgtatccaggagtctgcggatctgctcctgcttcatctccaactggtggctgtaatccatggtctgatacatgcatcccccacactgcggaaagatggaacagaccggttttctcgtttcaagcggtgatggttctaacacttcctgaagccttgcttctactctgccgcccctttttttattgatcataaaacgaactttttgcccaagcattccattttttacgatcaccgtctgtccgtccaccactacctttcctttattcggaaattctatctgttcaatgattccctcatatacttcgccttttttcatctgctgtcctttcttcttgttttttctgtctgcagcttttaaccgaagaaaagctccggggtctcctccgaagctttcctgccgttttgtgtattcacattttaattttcttcgttatcttcatcttcaaagtaatcgtcaaaatcatcatcgaaatcatcttcaaagtcttccagataatccggtgtgaaaaaacggtacactgcgtatgcaatacctgccactgccgcaacggcacctataattgccagtacccacattactgtgtttttgcatttttcttcttctttttcctgcttttgcagcaaggccattaactcgtcaagtttattcatgttaaacaccgtcctttctctaaaagcatagcttccaaaaactagtattattataccactatccctgtgattttaccacaaaaatttattctgttattttctttaattttgcaaaggacgcaaacattttctttgttccggctttatcaaaatctactgtaacctcatagtccttgcccccatcaacgatcgcctgcaccgttccggttccgaatttgatatggcgtactgtgtctcccacaccataagcaagtccctgtgattttttaacttcaaactgttttggggaaaagctggtcttctggtaggtctgacgcatctttgcataactgctggatggttccggcatctttgtaatccttcgcgctttcggctctcttccaagttctaccagttcccgtggtatctcccggataaaacgggataccttgttatactgtgtttctccacggatcatacgttgctgtgccgcactcaacgtcagttccttcattgctcttgtaattcccacgtagcagagacgtctttcttcttccatatcctgcggatcatctcccacaattgtcatataccccgggaaaataccatcttccatacccgccagatagacattcggaaattcaagacctttcgcgctgtgcagagtcatcaaaagtacgcggttatcactctcttccaccgaatcgatatctgctatcagtgccacttcctccagaaatccggacagacttggatcttctgcctcatcctcgtaagacgctgctttggatatcaactcatcgatattttcgatacgtgcttttgcttcatccgtatcttctgcttcaagttctttcacataacctgtctcttcaatcagcttttccagcaactcttttaccgacagatattctatctggctacggaatttctgaatgaattccacgaatggacgtacttttgcacttccacgaccaagtgtcgggatctcttccgcctgtcgaagtgcctgataaaaactgataccataagcatccgcataatcctgcacctttccgagagttgccgcaccgataccacgttttggtacattgatgatccttttgactgctacatcgtctttcgcattatcaatggtcttcatataagcgagcagatccttaatttcttttctcgcatagaagtttacaccgcctacgatcttatacggaatatttgcaatcaggaatttttcctcaaacagacgggactgggcgttggtacgatacaaaatcgcacagtccttgtaatcatagattccttcccggactttctggctgatcgcacctgcaatatattctgcttcttcatacccattctgaaactgacggaaatgaatgggagctccttcttcatttgccgtccataaggtcttgtcttttctcccctcattatttttaatcacttcgttcgccgcattcagaatattctgggtagaacggtaattttgttccagtttaatgacttttgcctgtggaaatactttttcgtatcccagaatgtttccgatattggcaccacgaaacttgtaaatggactgatcatcgtcaccgactacacagagatttttatatttctctgccaacagacttacaaatttgaactgggcagtattggtatcctgatactcgtctaccatgatataacggaaccgttcctgataatagtcaagcacatccgggcatgactgaaacagttccactgtttttacaatcaaatcatcaaagtccagcgcgttgttctgacgaagctgcttctgatacgcttcatacacacgggcaatcgtctgcgcaccatagccggaagcagtcgaagcctgcagtttatattctgccggagataccagttcgtctttggcggaagaaattgctgccatcaatgttcgctctttaaactgcttggtatcgatgtttaacctcttgcagatctctttgattactgttttctgatcatctgtatcgtagattgtaaaattattatcgtaccccagtcgatcgatatatctgcgaagcatccgcacacagctggaatgaaaggtactgacccagatactttcggaaccaaatcccacaatctgatccactctttcccgcatctcctgtgctgccttattagtaaaagtgattgccataatattccacggattaatccctttttcttctatcaaatatgcgattcggtgtgtcaggacacgggtttttccagatccggcaccggcaagaatcaaaaccggaccttcggtatggaataccgcttcctgctgcatcgcattcaaactatcatatttactcatattttcctctccatctcttacatgtatctcgaaatatttccggaaatacattttttcgtacaggtgttcttatcatatcatgcacccgttcgcaagtcaattgttaccggccactcccgaaacagtatctcaactgtcttgtaccgatccaatcaccgataagctagttgcttcttgtgctcaggaacgttaaaaaaaagatttacaaatagtattaaaaactatataatagggtggaagaggtgatatgatgacgattgatacaagtgatcttttaaacagcattcttggaagcctttcccgtattgattatatcaaaccggaggaggtaccaaatattcctttatatatggatcaggtaaccacctttatggatgctcagctggcttcctccaagcgctatccggaggataaaattcttacgaaaaccatgatcaacaattatgcaaaaaatgatctgcttcctccgccactgaaaaagaaatactccaaagagcatcttcttgtgctggtgtttatctattattttaaaagtattttatctattacggatatacaggcactcttaaagcctattaccgatacgtatttttcttcctctgagaacctctctctggaagatatttataatgaagttttccgccttgaaaaatctcaggtagacatcctgaaggaagatattaccaatcgctatcggctatcccgcgaaacgtttcaggatgccccggaaaaagatcaggaatttctgaaaactttttcttttatctgccttctcagttttgatgtatatgtaaaaaagcagttaattgaatctctgatcgacgatctgcacccggatactaaagaaaaaaagaaaaaataacattaaaaatgcaggattcgatatttcttcgaatcctgcattttttgctcgtacccgggaagataccgaacaattacattttttctttattcttttactccgagacgaaccagtgctctttgcagttttgccttgacgatccgatattccttatcgctgagaccgccttctgccagtctggcttccgcacgttttctggcatcttccgctctctctgtatctatatcttcttcccactcccaggttgttgccagcacatggcaggttccattcatcacagaaagcatcccgccgatacaggctgcattcttcctgctgccgtcttccagtataatatgggcttctcccatgccaagtgccgtacagtaattgcagtgtcttggcaaaatcgcaagatcaccattgattgtccggcagacaagtcttgcgacttctccttcatacagcagtccgtccggtgtaccgatacgcaaaggaaatgtgctcattcgttaccctcctttactggttctgtgcttttgctttttcaaacacctcatcgatgtttccggcaaacaggaagcagctctccggaatctcatcacacgctccgtcaaggatcatgcggaatccacgcaatgtctcttttaacggtacataagttccctccattccggtaaactgttctgcaaccgagaagctctgcgacagataacgctgtacttttcgtgcacggttaaccgtctttttatcttcttccgacagttcatccatacccatgatagctataatatcctgcagttctttgtagcgctgcagtacttgctgtactgcacgtgcaatttcataatgctcttttcccacaatctccggtgccaggatacggctggtagaatccagtggatccaccgccggatagataccctgactggcaatctctctggaaagaactgtagtcgcatccagatgggtaaatgtcgttgccggcgccgggtctgtcaggtcatccgccggcacatacacagcctgtacagatgtgatggatccttttctcgtcgaagtgattcgctcctgaagtgcacccatctctgtagcaagagttggctggtaacctactgcagacggcatacgtccgagcagggccgacacttccgaacccgcctgtgtaaaccggaagatgttatcaataaacaagagtacatcctggtttttcacatcacgaaaatactctgccatcgtaagaccggacagacccacacgcatacgtgctcccggtggttcattcatctgtccgtacaccagtgctgttttatcaataacaccgctttctttcatctcattataaagatcatttccttctcttgtccgctctcctacaccggtaaatacagaaagtcctccgtgagcagttgctacgttgtgaatcagttccatgatcagaaccgtctttcctacccctgcaccaccgaacaaaccgatctttccacctttcgcatacggacagatcagatccacaactttaattccggtttccagaatctctgttgccggaacctgctcttcgtattccggtgcatttctgtggatcggccattgttcctctgtgattaccggaccctgatcatctaccgtctctccaagcagattaaacaccctgccaagacaggcttctccgacaggaaccgtaatcggttttcccgtatccaccgcggcagttccacgaaccagaccatctgtcgatttcatggcaatgcaacgaaccgtatgatctccggtctgctgcgccacttccacgatcagtttttctccatgattgtctatttctatggcattcaggagtgcaggtaactccccctccggaaagcgaatatccagaaccggtccggtcacctgtattacttttccaatgtgcttttcgctcatctaccaatctccttaccttatatttttctttcagcttcctgcaccgtatgtccggctacagacattctgcacctccgacaatctccgtgatttcctgagtaatgcctgcttggcgttcccggttataatacaaattcaactcatcgatcatatcctgggcattaccggttgctttctccatagcatttcttcgtgctgccagttcgcttgccacactctcacagacaccaccgtagatcagacctccgagatattccggaacaatggagttaaacacttccactccatttggttcatacaaaatcagattacaaattctttctttctcattatatccctgttcttcttttgcaatgtctatcagtggaagtaccggaactgattccgggttctgcgtcagaatggaaacaaatcgggtataacaaagttccacatgaccaaatgttccctgtcgaaattctttgcacaggatagaagcgatttcaaaacagtcagctacagaaatatccgcaatttctgcaaaagcgtctgtgacgtattccagattgttggatctgacatattctaccgccttttttccaataggaagaacactgaccattttcccttttgcatcctcctcaaaacagcgcagtaaattggcattatacccacctgccagtccccggtctcctgcgatcagaacataacagcatttttcctgaaccgcttctttcacataaacagaatagaattctgtatttcctttagctatttcctgtaatgtacggtacaactcctgaaaataaggacggcaggtatccgcccgctccttggcctttcgcagcttggaggacgccacaagttccatagccttggtaatctgcatggtgctttccacactttttatccgcagttttaccgctttcatatttgcagccataggttcctccttctttttttatttatttttgaattcttgtatccaaaaagctttctgtataagcttccagagcgcttttcagtttttcttctgtttctttttccagttttccgctttcccggatcacctgcatcacttctgctccacgggcatccgtatccagccatatatataacccttcctcatacagttccacatcttctgtcactactttggacagaattccttttgtgaccgcataaagaatcgctacctgcttttctaccggcaccggtgcattctgtttctgttttaaaacttctacaatccgtgctccctgttccagacgcattttggtatctgcatccagatcagagccaaactgtgcaaaacttgccagttctctgtactgggaataaatcagttttaatgtacctgcaactttcttcatcgccttaatctgcgcatttcctcctaccctggaaactgaaacacccggattaactgccggcataacaccggaatggaacagttctgattccaggaatatctgtccatccgtgatagatatgacattagtcggaatataagctgaaatatctcctgcctgagtctcaatgatcggaagtgccgtcagcgatcctcctccatgtgcatcatccagttttgccgcacgttccagaagccttgaatgaagataaaatacatcgcccggataggcttcacgtcccggtgggcgtcgaatcagcaatgacagtgccctgtatgccactgcatgcttactcagatcatcgtaaataatcagaacatctttcccctgatacataaaatattcacccatcgcacagccggtatacggtacgatatactgcagcggacttgcctccgatgcagtagctgcaaccactatagtgtaatccatagcaccatttttctccagattttccacaagagaggctacggtagaacgcttctgtccgattgccacataaatacagatcacatcttttcctttctgattcagaatggtatcggtggctatggttgtctttcctgtctggcggtcaccgatgatcagctcacgctgacctcttccgattggaaccattgagtcaattgccttgataccggtctgcaacggctgacataccccctgccgttcacagatacccggcgcctgactttcaattggccgatactccgatgcactgatcggtccccccgcatcgattggctgtcccagcgcattgacaactctgcctatcagagtctcacctaccggaacggatactacttttccggttcgttttaccatctgctcctcactgatggcttcccccgaaccaaataaaacaacagatacactgttttcttccaggttctgtgccataccaaagcttccgtcttcaaactccagcagttcccctgccatacagtttgcaagaccactgactctggcaattccatcacctaccatcagaacggtacctgtttcatcctgccggatcgcattctcataatacttgatctgacttcggatgactttggatatttcttctggtttcagttgcatgttttcctcctacactgttgcatgatgaatcttgtcggaaatctccgaaatccggttcttcaccgttccgtccagcaattttccatccagttctacccgaacccctgccagtaacgccggatcggttttctgaatcaggataatctcttttccactgatttttttcagtttttctttcaggcgtttctgctgctcctccgacagaggacagacactggtcacaaccgcctcagcgatattatgatcttcataatatctgcttttgaaagcctcgaaacagccggaatattccccgagaagatttttctcacacatcagtttcataaaattcaccaaatatcgttgcgcctgacctccaaatgccgcctcgatcatcccgtttctttccatctgaggaatcgaaggttctgacaacagtcgttcatactccggattctcccgtaaaagtgtgcggatctgttccatctgcccaagaatctcaccggtcagattttcctcagctgcaaggtcgtacagactgcccccatagattctggcggtttctgtcatgatacttcacctacattcgatataaattcgtctattagcttttcatggtctttttcattaatttcacgttcaatgacttttccggcaatctccacggccatatcgccaatctcgcctttcacttcattgactgcttttttcttctcctgggcaatctctttttctgctttattcttcattgcaaaggtctgatcctgagcctcttttaagattttttcactctggatcgcagcagtatttcttgcgctgtccagaatctcattggccttttgtcttgcgtcctgcatatttcgttcatattctgcacgaattgcctccgctttcgcttttgtctcctctgcctgtatgatttccgcatctgcagccgcgcgtcgtttttccagtatctcgtgtaccggtttgaacaagaatcgtttgatcagatacatctgaataaaaagattgcaaatctgtgcaacaaatgtccaggggataattcctaccagttcctgaacctgcataatgttattcctcctagttttcttttcgttcttatcccaggaatttcataaacatgccaggtgccacaaagatcagaagcagaccggttacaaaaccatagatacccgtggtctctgcgattgcacatccaagcagcatggtacttgtaacatcgcctttacattccggctgccgtccgattgcttccagtgcttttgccactgcatttccttcaccgataccaggaccaatacccgcgatcagcgaacatcctgcgccgattgcacatcctgccagtgcgataccttttgccaaaatctgaaaatccatattatttcctcctataagatttacctgaaaatttcgctacacatgttttcttctgtttttccctgtatcgtccatctattcctctgctgcattcgcgatgtacatcaccgtcaacatacagaaaataaatgcctgcattactccggaaaaccagtcaaaatatacagataatactgcggggattcccacatccagaaccgggatctgcgaaagtacatttcccactgctcccggaatcagtcccagcaattttctacttgccagagcaagtgctccataaatcagtgcattgattacaacccctgataaaatattaccgaaatgacggcacgccatactgatcggcgttgccagttcagaaagaatattgaatggagtcataaccggaatcggtgtggtaaatcctttcagataccctcccacaccgtttgtttttatcttctgcgctgtgatcatcgtaaaaaccacagctgcccatgcagcctctgtagaaagatccgctgtcggactgcgaagtccgatcaggctgatcagattggataccacactggttgcaaacaatgctgatacgaacggaatcaggtaccggaacttttctcccatatttcccagtacaaacttatccgcagtctccacgatccattcggctgccgcctgtttttttgaaatattccgtaccttcagtcctctggtcagccagatgcatattcccgtgatcagcgccatgacgatccagctgacaatcagtgtctcgctgatctgtaattctcccagaagcggtacatcgatcggggtcgtaaaaaagacctttgcaccggagatatcaacctccatccctgtctctcacctccttattttcctttcactgctcccaccagtttgattgctgttccaggaatcagaagtggaaggattccagctacaaactgaaaacagggaagaacaattgtaagaatcacccacagcatctgcatcatattccgctgagaataactggcctgaatccatcgctttgccgctgcttcctctgtctcagctgcggctttctgcactgccatccccatcagaaaaaaattcaataccgcaaccgcaccgccgaaaagcccgccaagaatcacagtataatcaaacggtactttctccggcatcacaagatgcaatgccagaaatacacaccacatcactgccacacctgctgccgtgtacaccataacatgttctgtttcttttcttacggcaggctgaattctttcttttctattgttcatattgtcctgttccctttcctaaagatgtctattgaaagatacttttgattttcttttttctgtccgttcctgacgcataaccaccgaccggtaaaacttccacgctgtcatggcagatcctccaaggccaaagaaaaagccgatcagatagatccagccacccaatgaccagcggttactgctccaccagcacaaccccagacaaagtaaaagaggtgtcacgagagacagactgagctgtgtcagcatcgtaagtttttcaatgatgtctgtccactttttcattttcccttcctttctgtacattttttacaatagttatctttccttttcgaaaatttcttgttcacattgtaacatatttttcgtatctcagcaaacatttttgtgtattgttatttttttctcacttttttcattttctgttcgtgaaatttttcttatttcataaaatattggcaactgtttataaaattgtaactattcagtagccactgtcccgcgaggtgttttgacatgaatatgtcaaaatcccgagacatacaagccaaaatgccatcaccgaaggtgattttttatgtattttggctcgtaactgtgaaggtactgaacagttacataaaattttatatacttctgtaaattctgcggatttttactgttatttctttaacagcaaaacacacaaaaagatcctgtggctttgattttccaaccacaggatcttttctttcgtactttattttctttttgttctttattcttctttctctccgatccggttaaaaaccatctcatatccgtcatttccgtatgtcagagagcggttcacacggctgatcgttgctgtggatgctccggtcttctcggaaatctccagatatgttttcttctggcgcagcatccgtgccacttcaaatctctgagaaagtgataacagctcgttgatcgtacacacatcttcaaagaatgtataacattcttctttattttccagacataaaacagcttcaaacaaatgatcgactgcctctgtatgtatttttttactcatgattttctcctttactaccccatattttcattgcgaacataaagtaccaccatttcttcttccgggcacttaatatgatacaattttaacacaatacagcaaaaaagcaaggggtttttcctgtctggtgttttgacttgcaaagcgtcccctccaatgatatgattaaataaattgggaaaaggacgggactgtaatgagaaaatggctggaaaaaccttatcattccctggactatatgcttcaggagcgtttcaaagaaaaagtttataaaatcacattaaacggaggtatgtcctgtcctaaccgggatggtacacttggaaaccgtggctgtatcttctgcagtgccggaggttccggtgactttgcggcagatccttcccagtcagtttctgcgcagatagagtctcagatgtcactgatacaaaaaaagcgcccggtacagaagttcattgcttattttcaggcatacacaaacacctatgcaccggtttcatatctgcgcccgctcttttttgaagccatccgtcatccaggtgtggtagctctcagcatcggtaccaggccagactgtctgggggaagatgttctcacacttctctcagaactgaacactatcaaaccggtatgggtagaactgggacttcagacgatccatgccgatactgctgcctatatccgaagaggttatccactctctacttttgaagccgcagtaaaaaatctgcatgcacgtaatcttgaagtcatcgttcacacaattctcggacttcccggggaatcttcggaacagatgcttgagacaatcaactatctgaactgccagcccatccagggaatcaaattgcagttgcttcatgtactgaaaggaaccgatcttgccgatgattatcttgccggaaagtttcagacactttcccgtgaagaatacctagatcttctgatttcctgtctggaacatctgtcccctgatcttgtcattcaccgtgtgaccggtgacggacccaaaaatttactgatcgcacctctctggagcagtgccaaacgttctgtactcaacgacctgcatcatatgatgaaagttcgaaacacctggcagggtcgactttataaggaggatctgtatgattgaaaatacctctacactttataaaatgatcattttatacatgctgaaaaaagtaaccttccctctttccaacagccagatcaccaactttctgctggatcatgaatataccacatattttcatattcagcagacgatccatgatctgatggatacacatctgattctggagcgaaaacagggaaacagtatctgctatgagatcactccggaagggcaaaaaacactttcttattttgaaaagaatatgtccgattccatccggctggaggtggacagctatatcctggaaaaaggatatgaaatgcggaatgagaattctattaccgccgaatattaccgcacaccggaacaggagtataccgtccagctcggtgtacttgaaaaaaatgcaccgctgattcaattaaaaatcactgttcccactgaagaaatggcaaaaaatctctgtcataactggccgaaaagaagtcaggaaatctatgcatcggtgatgacatctctttcctgacttgttctgttcactccgttcttttcttttattctgctctctcccgtaaatgtcggagtctctctccggcctgtttttcataaccgatatctgttgggtgataaaaaacttcctctttgatctcatccggcaggtattgctgtttcacataatgttccgggtaatcatgggcatacagataaccaacaccatgccccagttttgaggatcctttataatgagcatcctgcagatgtgccggaacacttgtctttttctttttcacggaagccatcgccgcaaagactgcttcgcaggcagtattacttttcggcgcagttgccacataggttactgcttctgacagaatgatctgtgcttccggcattccgatccgttctactgcctgtgctgcagctgtagcaacgacaagtgcctgtggatctgccatacctacgtcttctgccgcacagatcatgattcttctcgcaataaatttgatatcttctcccgcatacaacatcttcgccagataatagacagctgcatccggatcagatccccgcatacttttaataaatgctgagatggtatcataatgctgatctcctgtcttatcgtaacgcactacccgcttctggatgcattcctgcgctgtttcaagatctacatggatttttccgtctgcacttctctctgtagtaagaacgccaagttctattgcattcaacgctgcccttgcatctccaccggcaatgtcagctagaaagtccagtgcctcctcactgacttctgcatgataactgcccagtcccttaaccggatctgtaacagccctgtccagaagttttcggatatcctttttttccagcgatttcagttcaaaaataatggaacgggacagtaacgcaccgtttacttcaaaatacggattttctgtggtagcaccaatcagtaccagcgtaccgtcttctacaaacggcaacaggtaatcctgctgtcccttattaaaccggtggatctcgtctacgaacagaatcgtctttttcccgtacattccaagatgttgttgcgcttcttttaccacttcctccatatctttttttccggctgtggtcgcattcagctgggtaaatcttgcgcttgtcgtgttggcgatcactttcgccaacgtggtttttccggttccgggaggaccgtaaaaaataacagatcccagtttgtctgccttgatcgcacggtacagcaatttgtctttgccgataatatgttcctgcccaaccacttcctccagcgtcgtcggccgcattctcgatgccagcggagactcattttccagcgtggtttctttcatataatcaaataagtccatcttacgtcctttctaattccttttgttgcatccggctgcactttcttttatcataccaaacttttgttcttctgtcatctattccagaaccatttcttccacattaacaaacacaaaaccctgtttctgcagatgatccacaagggcaaatgccgcatccacggaactccgatacccgtcatgcatcaggatcacatctccttctttcacctgtccggacagacagctcagtacctgttccttattctgcagtttccagtccagagaatccacattccagaataccgggatcatatccaccaccttttccagttcctgactccatgccccatacggtgggcggatatacacgggagcttctcctgtccactcccggatcagccggtttgtcttttcaatctctcccgtcgcctcttctatgctcagtttgtttaactgcacatgatgatacgaatgattgccaatcagatgtccgtcttttaccagctcttctaccattttacgacgtccttccatgttctcccccagaagaaaaaaggttgcctgcactctccgttcctttaatcctctggataattccaccgtgtactcacttggtccgtcatcaaacgtcagggcaactttacgtgcttcctgcggttcctccaccagttcctgtccgctcaccattatcatcctttttcccttccaggcaaggaacagatacagcatcccgatcaccaccagcccgctcttcttccaaagatacttctgcatcttatcgctccggtctttctcgttatgttactttatgtaaaagaagacaaaaaaagaccgccgcatcttgcgacagccttatcttttgtttttaattaagccagtttgcttttagccagctctgccagtgtagcaaatccttctgcatcgttgattgccatatcagccagaacttttctgttcagttcaacaccagccagtttcaggccgtacataaatttgctgtaagacagtccgttcattcttgctgctgcgttgatacgagcgatccacagctgtctgaactgacgttttttctgttttcttccagcgtatgcacttgtcagagcacgcattacagactgttttgcaactctgtactgtttggatcttgctcctctgtaacctttagccagtttcagaactctattgtgttttttctttgcgtttaatccgcctttaattcttgccatctcttatattcctccttcaaactcaatcttataaatacggtaagatttttttcatgttcttaacgttgctctgatccagcacggtagcttttctcagatttctttttctcttctgagttttctttgttaagatatggcttttataagctttatttcttacgattttacctgtacctgtagttttgaaacgtttagcagctgctctgcttgttttgatttttggcattttatagtcctccttagatttactctgttattttaacgtttttcagttaaaaacatagtcatgcttctgccttccacttttggtgctttctctaccactgcaatgtcagccagtttttctgcgaaatcatccagaatatatttgctgttgtgcatgtgcgccatctctcttccacggaaacgaagagtaacttttaccttgtcacctttggaaatgaactttcttgcagcacctactttagtgttcagatcgtttgtatcgatattgggagacagacgaacttctttaacatcaattgtacgctgttttttctttgcttctttttcttttctggccatctcatatcgatattttccgtaatcgataatcttgcaaaccggtggcttagccgtcggtgcaatcttcaccagatccagtcctgcttcctgagcatgtttgtatgcatctctggaagacatgattcccaactgttccccattctcgccaatcagacgaacttctctgtctctgatctgctcattaatcattaaatcgctaatagtagtgcacctccattattcttagataacctttccatatgattcgcattcactgccctgcagcatagccgcataaaaaaagcagatagaccgactatccgcaaatttcccctaagattactctttccacttaagtattaaccatagtcactcttgtgctaaggtgagagcggatactcttctttgttttcatacttgcataggatagcatagattcttttttctgtcaatatatttttgatgtttttcctgtttttttattttattatttttactcctataaaatctcttctttatatatactgtagtacttctgacattttccttacgcttccctgtatttttctctctctgtcttgtatctgccgtaaaatctggtataatgaccatgagtttaaatcagaatgcatgttccgatagagatgcatctggctttttctaatctaaggaggggaatatttatgaaaaaaaaatggatggcttccacggctctcgcctgttcctgtatgttattaatcagtggctgctccggaaataaagcagatgattttgatgctgttgcttatacaactgcatatctcgacggtatgatccgtggaaatgtggatacgctttcttccttgtcaggagtttcttctgatgatcttacagtcaccttcaattccatgatcgatgatctggtgtcttcttccattggtggcgacggaagtagtcccggaagtacacagatttctccacagttgcgtcaggactatactgatttctggaaacaggctttcagtaacgcaaaatacgatgtaaaaaaagcagataaaaaagagaacacctatcagataactgtagatacccaacaaatgcaactttacactgccatggaaccgatttatgatgagaaacttgccgattatctaaaggataacagcgtagacagtgaccagtatatcgaagatgtatactctctgatgctggaagcttatcaaaccgcccttgacaaagcagagtacaacgatccggaatctgttactgtaactcttcagaaagatgattccgagcagtggagtatttcttctgacgatatgaccactctgaaaaatgctctgattgatcttgcctctctgaatccttctgctgatggaaccaccggaacacctgcccaggtaaccgcagaagatatcgctaacagccagtctgagggagctccgaatatggaatatccgaaggatctggaaagtacaccagcttataaagtgggcgatgcgataactattcaaagtgacggaaaagacgttgctacatttacgattgacaaagtagaagttacggatgaccgcagtgaatatgatacttctaatcctgataaagttattgtcattacatacacatataaaaatctggcatttgatgatcctctcttatatgatcagatgagttttcgtgtgcttgacggtgatactgtatgtcttccttattatctggcagatctgacttcaccggatcttgccactaccggtggcgatgcagtaactgctaccgcagcttacggcatcagtgcttcctgtaatgaagtgaccatctatgtggatggagctcagatcgcattcccattccaggtttccgcatctgtttcataatgttatctttttcaaaaaactctccgtctttgtgtttcgcctcaaagaccggagagtttttcttatcttattgcagaatcatcttgctttattcacaccggaacgttccacaacaggtttcttcacagatacaggcctggcttccatcgatgtgcacatgatccgcctggcatacctcctgtctgttataggtacaatcatgggctgcacatccgacctgaatagagctgcagccgcctccgcatgtataagcattggacattccggtcttttccacaaaacttgaacaccaggtttcattttccgtagctgcatgatctccttttacctggatatctcctttggaacaaagattatccttattatacatacattttaccgctgaacactgtaatgctggcattgcacatacctccttcttcttaataataaagagcatgtccggactgctttctaatccgggcatgctctagtatgtgcacatgttctgtttttatacctaacatcactatcttaaacaagtgctttttccagtttttcgatcatctcgtcgacatctgcttccgtaatcacaagcggaggtaccatacgaagcacgttcgtccctgcggaaataaccagcagaccgttttcaattgctttcgtaaccacttctcctaccggttttccttccagtaccagtccctgcatcagaccttttccacgtcttgtggtaataaaatcatatttttccaccaactgatccagttttttctccagatacggtgcaactttattgacatgttccacaattttttcagattcaaacaagtcaaatactttactgactgccgcacatgccagagggttgccaccgtatgtggttccgtggtcgccaggtactaaagatgcgttggctgtcttttcattcaggacaaaggctcctaccggaacaccgcagcccagggctttcgcgcaggtcataacatctggctgtacgccgtaagcctggcaggcaaacatgtttccggtacgtcccataccgcactggatctcatcgaggatcagcagaatatcatgctcatcgcacagtttccgtacgccctgaaggaattccggctctgccggatagataccgccctcaccctgtacggtttccatgatgatcgcacaggtcttgtcggtaatctgtgctttcacgctttcaagatcattgaaatctgcaaatttgattcctccgatcagtggtttgaatggatcctgatagtgggtattaccggttacggataaagctcccagacttcttccatggaaagaatggttcatcgcgatgatctcatgatcgttggagccgtctttcaggtaagcgtattttcttgctactttgatcgcaccctcgatggcctcggttccgctgtttgtgaaaaacactttggaaagtccggttgcttttaccagtttctctgctgcttccatcattggtacattgtaatacaggttggaggtatggatcactttatcgatctgatccttcagtgcctgattgtatgcctgattattgtatcccagggcaaatacagcgattcctgctgcaaagtccagatattctttgccatctacatcatacagatgaacaccgtttcctttgtccagaacgatctggaaacgattataggtatgcagaatgacttcttctgcccgatcgatatattctttactgtacgtcataatctttgatctcatcctttctcagaattgcggttccgattcctttatttgtaaagatttccagcagcagacagtgcgggattcttccgtccagaatatgtactcttgaaacaccttcttcgatcgcatcgatgcagttttgtaatttcgggatcatgccaccgcctacattgccgttatcgatcagttcttttgcttcttttacaaataatttggacagcagggtggacggatcattcggatccagatatacgccttcgatatcggtcaggaatgccagtttttctgcatggactgccttcgcgatcgcacatgccgcatcgtctgcattgatattgtaagtatcaaagtttttatccaaaccaatcggacagataattggaagaaaatccttttccagcagatcttcgatgatcttcggattcacggaagttacatttcccacatatccgatatcttccccgttggaatatttcttttctacatttaacagggcaccgtcttttccgctgatacccactgcctttacaccgagagattctaccagtgttaccagttctttgttgactttaccaagaaccatctctgcaacttccatggtatctttatcggttacgcgaagaccgttgacaaatcttggttccataccgacttttcctacccagcggctgatctcttttccgccaccgtgtacaatgatcggcttgaatcctaccagtttcagaagtaccacatcctggatgacctgacgtttcagattttcatccaccattgcgcttccgccgtattttaccacaataattttccggttaaaccgctgaatataaggcagtgcttcaattaacacctgtgctttttccagatattctgtctttaccattttcttttgttctcctctttctggttcttgtatatctatttatgaacgatagtccgcgttgatctttacataatcataggtcagatcgcagccccatgcggtagctgtcgcctctcccatcttcacatctgcaatcgctgttacttctttttcggaaagaatctttgtcgcttcctcttcactgtaatcggtcgctacaccgtctttgatgatcttcagttttcctgctttactctcaaaatacagatctactttttccggatcaaactgtgccccggagtatcccatcgcacacaggattcgtccccagttcgcatcatgaccaaagatggctgccttggtcagattggaagtgatgatggatttacttaaagttaccgcctgttctttgctctcagcgccaactacttttacttcaaataatgcggttgctccctctccgtctccggcaattttctttgccagacaggtattgacatagagcagcgcatccaggaaggtctgatagtcttcattttcttctgtaagctcatcattgcctgcagctccgtttgccagaagcagtacggtgtcgtttgtggaggtatctccgtctaccgaaaccatattataagtatcttttactacggtactcagtgctttctgcagcagttccttggaaattgccacatcggtggtcagaaaaccaagcatcgtacacatattcggatggatcataccggatcccttgcacataccgccaagtgttacggtctttcctccgatctccatggtcactgccacttctttcgatacggtatctgtggtcataattgactgtgctgccagttttcctgcctctcttgtatgggataacagcggtaccagattctttatgcctgcacccagaagatccatcggaagctgtttcccgatgacaccggtggatgccaccagtacagaatcttccggaatctgtaggctttcagctgcgatctttgcggtttctttgcagtaaccatatccctcttcaccggtacatgcatttgccacaccgctgttgcatacgattgcctgtgctgtcggtgcatcgtatacaatatgctgatcccattttaccggggctgccttcaccacattagtcgtgaaagttcctgctgccacacacggtttctcgctgtataccagtgccatatcttttgtgtttccttttttgatcccggctgccagtcctgctgcctgaaatccttctgctgcggtaactccgccgtcaatgatcttcatcatgtccactctcctttgagtctctttcgttctgtagttttttctctcctacgggaacattggaaccagttcaagtccttcactctctttcaacccaaacatcaggttcatgttttgtacggcctgtccagccgctccttttaccaggttatcaatggctcccatcatgatgatccggttggttctcggatcgatcttgaagtttacatccacatagttgctgccttccacccattttgtctgcgggcagacatctttttccagtacacggacgaatttttcatctgcgtaatatttatcataaattgcctttacctcttcatacgtcacatcttttttcaggcttgcataggccgttgccagaatcccacggttcatcggtaccagatgcggagtgaagttgatcgtgatcttttcgccgcatgcataacccagctgttcttcaatctccggggtatgacggtgggtcgccacaccatacgctttcatattttcattgacttcgcagaacagattgtccactttcgcaccgcgtcctgcaccggaggtaccggattttgcatctacgataatcgtgttcggatcgatgatgccttcttttaccagcggatagcaagtcaggatactgcaggttgtatagcatcccggattggctaccagacgggctttctttacatcctcacggttgatctcacacagtccgtacacagcttcttcgataaactgcggtgatttgtgctccagtttgtaccattcttcatatacctttacatctttgatacggaaatccgcactcagatcgatgatctttactttcgacagaatctcttcattgactaaagatgcacacagcccctgcggcgttgctgtgaaaatcacatccacctgatctgccagaacttccatattatcatccatgcagtttgcatctaccagctggaagaagttctgataaatggacgcatattttttatcaatgtaacttcttgatccgtaccacttgatttccacatccttatgccccagaagaatacgaaccagttccgaccctgcatatccggttgctccaataataccaactttaatcatttcttcaatctcctctttctttcataacgttaatttattctactctcttccactgccaaagtaaagtgcctgagatgagatctttctttttttctctttacagttgcataattatacaacattagtgaataatatgcaagtttttttatttttttccatttctctcttgctttttctatttatatgatgtatattatgccttgtaaaattcatctgaatttgattttgtcccgataagatatacaatcaaatgcataaaaatacattgtataccgataaacgggactgaacaataacatatatctgtaaggaggatattataatgaaagaaaaagtaatcttagcgtattccggcggactggatactaccgcactgatcccgtggttaaaagaaacttttgattatgaagttatctgctgctgtgtaaactgtggtcagggtgccgaactggacgggctggataagagagctgccatgtccggagcttctaaattatatatcgaagatatcgtagacgagttctgtgatgaatatatcgtgccttgtgtacaggcaggtgccgtatacgaacacaaatatctgctgggtacttccatggctcgtccggctatcgccaaacgtttggtggaaatcgccagaaaagaaggtgctaccgcgatctgccacggtgctaccggtaaaggaaatgaccagatccgttttgaactgggtatcaaagcactggctcctgatctgaaaattatcgctccatggcgtatgactgatgtatggactatgcagtcccgtgaagacgagctggaattcgtaaaacagcacggcatcgatctgccattcgatgcaaaacacagctacagccgtgaccgtaacctgtggcacatcagccatgaaggtctggaactggaagatccggcaaatgagccaaactacaaagatctgctggttctcggtgtttccccggaagatgctccggatcagccggaatatgtaaccatgacgtttgaagccggtgttccgaaaacactgaacggaaaagcaatgaaagtttctgagatcatcaccgagctgaatgcactgggtggaaaacatggtatcggtatcatcgatatcgtagaaaaccgtgtcgttggtatgaaatctcgtggtgtatacgaaactcctggcggaactatcctgatggaagctcacgatcagttggaagaactgattctggatcgtgaaaccatggaaactaagaaaaaactgggtagccagttcgcacaggttgtatatgaaggaaaatggttcacaccactgcgtgaagcgatccaggctttcgtagaatccacacagaaatatgtaaccggtgaagtaaaattcaaactgtacaaaggcaacatcatcaaagccggtacaacttctccatatagcctgtacaacgagtctctggcatccttcacaaccggtgatatgtatgatcaccacgatgctgacggattcatcactctgttcggacttccactgaaggttcgtgcactgatgatgcaggaagtaaaaaacaataataaataatgcaaaacagttatccccggcagaaatcattctgccggggattttttatatctttgtctgtggttttcaggattttctcgttaccacgcttatttctatttttactcgttctcttccacatacttctgaatattcgaagcatttacatatttctttgtctcgtctccttcgatgactaccagtgtcggtgcctgcatgatgccgtatcttgataccagttccgggtttttctcggcatcgatcagctgatactcttcttccgcttctgcaagcatctgtttcgcaatcttacagttcggacaggtacttgtggtgaacagatatttcacactgtccggatgctggatcttcacatcgtcttttgtcatagttaccatcgttctggtaggatgttttccgcccatcaccggccgctcctctttcactgcttccaccggtttttctgccggtgcaccggagtgaaggatatcatacacggttctgttcttgtattcctgcgcttttccgtcattccagttctgtaccggacggtaatatcctgtaattcgactgtagacctctgccttcttgccacaggtcggacaagtgaaatgttctcccgcaatataaccatgttctttacataccgaataagtcggtgacagggtataataaggcagacgataattttctgcaatctttcttaccagtgtggctgccgccttccagtccggaagtttttctcccagaaacgcatgaaagaccgtaccggacgtatacagggtctgcagttcatcctgcacatccaatgcatcaaagatatcagaagtataatctaccggcaggtgagagctgttggtatagtacggggtatctccttcatgacctgcagtaataatatccggataatgtttcttatcatgctttgccagacgatatgcggtggattctgccggtgttgcttccaggttatacagttctccgtattcttcctgataatcggacaaccgttctctcatatgattcagaacatcttttgtaaacttctgtgtcttctcatcagccatgtctgcacgaagccatcttgcattcagtcctgcttcattcatgccaaccagaccgatggtggaaaaatgattgtcaaagcttcccagatagcgcttggtatacggatacagcccctcatccagcagttttccgatcacttctctcttgatatgcagggaacgtgcggaaatatccatcaggcggtccagacgctgataaaattcatcctcatcctgagacagataagcgatccgtggcatattgatggttaccacgcccacagaaccggtgctttcgccggaaccgaagtatcctccggtctttttacgcagttctcgcagatccagacgcagacgacagcacatacttcttacatcgcttggctgcatatcgctgttaatatagttggaaaaatacggagttccgtatttggatgtcatctcaaagagcagacggttgttttctgtatcggaccagtcaaattcttttgtgatggagtacgtcggaatcggatactggaaacctctgccattggcatctccttcgatcatggtctcgataaacgccttgttgaccatatccatctcctgtttacagtctttatacttgaagtccatctcttttccgccaacgattgccggaagttctgccagatcatccggtacagtccagtccagtgtgatattggaaaatggagcctgtgttccccagcgacttggtgtgttcacaccatagataaaggcttcgatacattttttcacttccggataagtcagatggtctgtctttacgaaaggtgccagataagtatcaaaagaagaaaatgcctgtgcacctgcccattcattctgcatgatgccaaggaaattgaccatctggttacacagaacactcaggtgtttcgccggagcagaagtaatcttgccttctattcctcctaatccttctttaatcagctgttttaatgaccagccggcacaatatccggtcagcatggaaagatcgtgaatatggatatctgcgtttcggtgcgcatctgcaatctctttgtcatagatttcagacaaccagtaatttgccgttactgctccggaattgcttaagatcagtccgcctacggaataggtaaccgtagaattttcttttacacgccagtcttctactttcacataactgtttacgatttctttataatccaggatcgtggacttcatatttcttactttttctctctgcttgcgatacaggatataggctttcgccacctcagaatatccgcactggatcagcacattttccacgctgtcctgaatatcctccacagatacctgatctttttttatctttttctggaaatctgcggttacccgtagtcccagcatctccatcatatccggtgtatactgtttttcctgtgcctggaaagctttctcgatcgcctgggtaatcttactcagctgaaatgctgcaacttctccatcacgttttatcacattaaacattattccatcctcttttcctgttgcttttacaggctttattttatacgttcacctgctttttgaccctctcgcaattattcctttacggatgtgtcgattactatagtagcaaaccaattatcctctgtcaatacaaaaaactaccatatattgtgtcttaatttctacttgcacaatatatggtatgaatcttatgtaaccttataaagagggaaaagcaccttactataagggtttgccctcttttttcttcttttctcagatctgactgtaaacctccatcggcacataagccttcacagaaattccttctgccagaaattcttcctgcaccacctgtccatattttcggatcctggcaatacttcctgcctgatcatacggaaccagacgttcaatataaatctgtccttcccgcaaaacatccgcaagaagttctttcagttcttcaagtccctgtccattctttgccgaaatctgaagtacatgatctgcctgaaaatctctcagctgttctttatccgtacacagatcctgtttgttaaacagagtaatcactttcttatccgacacccccagctggcgcaatgtatcataaactacctgcatatgtccatccatctggggattggaagcgtctaccacatggaggatcatatctgcatatttggcttcctccaatgtacttttaaaggcctcaatcagatgatgcggcagttttcgaataaatcctaccgtatctgtcagaagaatctgctgtctgcccggaagatccagcgcccttgtcgttggatccagcgtggcaaataactggtcttcctcaagaacccctgcctgtgtcattgtattgagcagtgtggattttcctgcgttagtatatcccacgattgccgccaccttcacctgactcttatcccgctggctgcggatcagttccctgtgcttctgcacctgctccagctgttctttcagctgaccgatccggctgtggatcagtcgacggtccatctccagctttttctcacccgggccacgggtaccaatgccacctccgagacgagacagcgaagcacgcataccgaccagtcttgccgcccggtactttaattgtgcaagttctacttggatctttccttcgctggtctttgcacgctgcgcaaaaatgtccagaatcaccatggttctgtccatcaccttacattccagttcctgctccagattatttagctgtgccggtgagagttcatcatcacagatcacacccgtggcatccaaatcatacaacaactctttcagttcttccagctttccttttcccagataggttgccggatgaatggtctctctgctttgcatgatcgtcccaacagttacggccccggctgtctcagccagttctctcagttcatataaagattgtacggtatcatcagactcatatgtctgtacgcctgccagaatcacccgttccagctgttcccccatctcatacatgctttttcctcctatcttgtagaaagaaactcgttctcccgaagagccgcctcatcttccggatactgttccagatatatcttcatcttttcttttgctgtagcaaaatctcgtttatattcataggccacaatttcattataaagcaaaccctgttcgtcctctttggaattttccttcagaccctgtgcgatattctccagtgcgctatcatatgcgccatcataaatatcacacattgccagtccgttataggccttggcaccctgctcactcttttgcagatattcctgatacatggatctggcacttgccggatcttccatctccagatatacccgacccaaaagcagcatggcatcctcatatccctgttccatcgctgttttcaattcatctctggctgcctcataatttttttcatattcgtagattcttcctctgtgatagcaatcttctccgtcctgaggttctaactccagagccatcttcagataggcatcaccatctactgccttgttgtgatccacataaatctgataaatattgatatacaaattataatcttcacagccttccagtgctctctgaaagtctttttcggcatttttataatcttccatggaaatatatgcctttcctctcagaaagaatgcctgttcgtcttccccggccttcagtatctcgctgtacacttcaatcgctttatctacctcgccataatccatgcgtgcctgggcaagataaaactgtacatcttttttaaattccttatccggatcatccatattgttcagacttcgcgaaaaagcagcaatcgcctccggataggccttttctgaataataggcaattccttctgcccggtaactttctgccagtctgctgttttgatcgattacctgctgaaattcgtttactgcagtagtgtaatctttttttcccatagccgcccagccgctttcataatgttgtgccgcattattttttccacagccgcagaacaccatcagcgcacatccaaccgccagtacctcttttctcatgacaaaatcagtccctctttgtccatcacttcaatcacgcgctgtaccatttcacgacagatcgcatcttttttcgcttctaccataacacgaatgaccggttcagtgccactctcccgcacaagaattcttccgtcttctcctaattctttctccaccgaggcaactgccttctttacttcttcgttgtttcttgcagctgttttattggcaacacgaacattttccagaagctgaggataaatggaaacttctgatgcaagagtatttaataactgttttttttcaataataacttccatcagcatcaaagatgtcaggataccatctccggtagtagcatgtttgctgaaaataatatgtccggactgttcaccgccgagactgtgtccgtttgccatcatgttttcacagacatatttatctcctactgctgttttttcgtaccggataccttccctgtcacaggctttataaagaccaaggttggacataatcgtagtgacgatcgtattattttccagttttccggtctctttcatatattttccacagatatacaggatcagatctccgtcgactacatttcccagatgatccacagcgatacaccgatccgcatctccgtcatatgcaaatcccacatccagatgtttttccttgacaaattgctgtagcacttcgatatgtgttgatccgcagttcgtattgatgttcgttccatccggctcattattgatgacataggtttttgctcccagtgcatcaaacacactcttggctaccgaggaagcacttccattagaacagtccagtcctactctgtagtttttgaacgaacgggtaggaatggaaatcagataaccgatgtaccggtttcgtccggccgcaaaatccaccgtccgaccaatcttttcttttgttgcaaacggaatcttcggaacatcatcatcaatatatccttcaatcatggcttccacttccgcatccatcttttgcccgtttccgccaatgatcttgatgccgttatcataaaatggattgtgactggcagaaatcataattccacagtcaaaattttccgtccgcactacataggaaacgcttggtgtggtggttacatgaagcagatacgcatccgcaccggaagcagtcagtcctgcaaccagagaatactcaaacatgtagctgcttcttcttgtatcttttccgatcacaatctgtgctttgtgttctcttccataataccatccaaggaatcttcctactttataagcatgttccacagtcagatccacattcgcttctccacgaaaaccatcggtaccaaaatattttcccatgatgtttcctccgatccttttatttacatattttgtttattggttcatttttgccagcttggctgtctggtctgctgcgatcaggctgtcaatgatctcatcaagatcaccatttaagattgtatccagacgatgcagggtcagtttgattctgtgatctgtcacacggccctgcggaaagttataggtacggatcttctcggaacggtctcccgtacctacctggcttcttcttgcttccgcttcttcgtcatgacgtttctgcaactccatatcatacagacgggagcgcagaacacgcagtgccttatctctgtttttgagctgtgatttttcatcctggcaggaaattacaataccggtcgggatatgagtcagacgtaccgcggagtctgtggtgttgacacactgtccaccgttaccggatgcacggaatacatcaaacttacagtcattcagatccagctggaaatcaatttcttctgcttccggcatgattgctacagtaatcgtagaagtatggatacgtccaccggactctgtctccggtacacgctgtacacggtgcacaccactttcgtacttcagacgggaatatgctcctgcaccattgatcataaaagtaacttccttgaaaccgccgatcccgttttcattcagagacatcagctcggttttccatctgcgggactctgcatattttacatacatacgatagatttcagcggcaaataaagcagcctcgtcaccaccggcgccggcgcgtatctcaacgataacatttttactgtcattcggatctttaggtagcaacaggatcttcagttctgtctccagttcttcaattctgctttttgcatctgccagctcttctttcagcatctcacgcatctcttcgtcagattcttcatccagcatcatcagactctcttccaccgtctgctgacacgctttatattctttgtatgcatccacaattggctgcagttcgctctgttccttcatcagcttctgaaaacgtgtaggatcatttgcaactcccggctcgtttaattcacttaaaatttcttccagacgaaccagcagatcttctaatttatcaaacatttctcttcctcctggtatatttcgtaactgctcagtaccttcacagttacgattcaaaatgcattccaattattgtttttctgtccaatggctacccggtcaagtcctgccagatctttgatgatctttacctgaccatagccggcttctgtcatcatctctttcagtgcctctccctgatcatatccgatctcaaagcagagccatcctccctgttccagatattcacctgcctgcgccacaatcttccggtaaaaatataacccgtcttccattccgtcaagtgccagtatcggctcatgctcccgtacctccggcatcagtccctccagttctttcgtggcaatatacggtggatttgacacgatcacatcataaactccctcaacatccgaaaacagatcactctctctgaaatccgctgtgagtcccatcctgtttctgtttgcaattgcaacctgcagtgcatctttggaaatatctacacctgttgccgcgctgatcctgcccttacattcttccagcaagctcagcaaaatacagccgcttccggtacatacatctaataaccgacatcccggcataatatgttttattgtctcctccaccagaacttccgtatcaaatcgtggaatcagcacactggaattaaccagaaattcataccccataaaccaggcttttccggtcagatattgtaccggaatccgttttgcccggtcccggatcatctcttcatatcttttttgtacatccggatctattttatcagttccgtgaagaaaataatagcttttttctattccgaagacttcttccatcaacatccatgcatcctgtccgctgtccggtacttcggctttctccagtgtttcgcttccccatgaaagcaattgtctcaatgtactcatgacttttctccgtattgttccggaaagttctctttcagataacttctccagtcaaataccgcttctaccgctgcgatagcaacctctgccatctccggttccggctctctcgttgtcagatgctgtaacatcagccccggtttactcaacaatgctacaattttgttatcactttttcctgccagccggatgatctcataagatactccggcgataaccggcatcagaagcagacggatcactacccgcagtaccggtgaagacacccggataaacaaaaagaaaataatgctgacgatcatgacaaacagcaaaaagctggttccgcagcgtttgtgttctctggaacttttcattacattttccacattcagttccagtccgtgttccacacagttaatacacttatgttccgctccgtgatacataaatactctctgaatatctttcattctggaaatcagcaccagataaccgagaaacagaatcatgcgtacacatgcttctgcaacagcgatcacgccttccgacgtcgtcacattccgaagaaaacctgccaggaaatacggcagcatgataaacagggctatggaaaatatcacagaaaatgtcattgtcccatacatcagccatttttcttctttttctttctgttcttctgtcttttctttccctggtttcttcgcatcctcttcttcgtcctcaataaaacttgccgaatacatcagacaccggatccccacaaccaaagattcaaaaaaagaagccacaccccggaaaacaggcagtttccaaatgctactgtcttttgcccagctcctgtatggctccaccttcacctcgatctcaccgtccggttttctgacaccaatggaatactgatctccactgcgcatcatgataccttccatgacagcctgaccacctatatttgaagatttcatcgtttctcccttacattcctatagagaaaaacaggttgagatttgtaaaaacctcaacccgcttgtcttttcttattgtcttatgcgttaatgccgtattttttgttgaacttatcaatacgtccacgagctgcagcagctttctgctgacctgtgtagaatggatgacatttggagcagatttctacgtggatatctttctttgtagaacctgttacgaatgtgttaccacagttgcaggttactgttgcctgataataatctggatggattccttctctcatttctttcacctcttccaattttcttatatatattttactattttctcaaatttaaacagcttgtaaagtataacatatgctctataaaaaagcaagtgcttttagataaatttctgattctttacctgatttaccagttcctgattgtttctggtttttgtaaacatgttcagtatgttctccaccgcctcatctgctttcataccattcaacgcttttcgcatgatatagacagcttcctgttcatcctgactcagtaagagatcctctcttcttgttccggattttgcaatatcaatggccgggaacactctcttttcctgcagtttccgatccagtaccagctccatattgccagtgcccttaaattcttcatataccacatcatccatcttacttccggtatccacaagtgctgtggcaagaatagtaaggcttccgccctctctcatatttcttgccgcaccgaagaatcgtttcggcatatgcagagctgccggatcaagaccaccggaaagtgttcttccgcttggtggaacagtcagattgtatgcccttgccagtcgtgtgatactgtcaataaagattgtaacatcttttttatgttctaccagacgttttgcccgttcaatagtcatctcagacacccgtttgtgatgttccggctgctcatcaaacgtagaatagatgacttctacgttatccccgcgaatcgcttccctgatatccgttacttcctccgggcgttcatcaattagaagaatgatcagatgcatatccgggctgtttcgaaggatggactgtgcagcctctttcaacagggtcgttttacctgccttcggcggagatacgatcatacctctctgaccttttccgatcggactgatcagatctacgatccgcatcgccatacttccgccagggcgttccaggcgaagacgggaatccggaaagatcggggtcatatcttcaaagctatatcgtttcgtattttcattcggtgacatgccgttgatagaagtcacatacagcagtgctccaaacttttcattttcttttcttactcttgtacttccccgtacaatatctcccgttttcagattaaagcggcggatctgtgaaggggatacatacacatcattctcacccggcatataattatcactgcggatgaatccataaccgtcagcaagcacttccagaataccgtttgcctcgattccactgtccagctgtccaaattctgcttttttatcctcgatctgtttttcctgctctttcgcatcctcctccagcatccgctgtaccagttcatcttttctcagagcagagattcctttcagtcctcttgctttggctacttcccgaagctctcctgctgataatgattcgtatttttctctcatcgcatgattcctttctatatgtctgatctgacacctgagatggttctagcctaccatcgtgtctgtggtttgtcaacttatgcctctgctttacctaggaaaatttccccagaaataatgcaggcggatattcttccccttctctgatcgtttttgtctgaaaatcactacacggacacatctcgattcccatgtcctggtgtgctaccggatatactgctgcaccccctgcaagatccaccagccattttctttcttttatcatacaatggcctcctttttcatttttctatcatgttttattatccgggaaatcaatgagaatctaagatatgaacatcagcaatttctataaaatgcggttagtgggactcgaacccacacggttgcccactggcacctaaaaccagcgcgtctgccaattccgccataaccgcctgtgtatgtgttctgcacagaaaacgaaaaaaggacaagcactaggcttgtccgatgagacatcggggattcgaaccccggacaacttgattaaaagtcaagtgctctaccaactgagctaatatcccataacctgggctaggcagattcgaactgccgaatgcaggagtcaaagtcctgtgccttaccgcttggcgatagcccaacgtacgccttacggcagggtggatacagggattcgaaccctgggcctccagagccacaatctggcgcgctaaccaactgcgctatacccaccatacctttcctctttagagaaaagaaacgtgcttggagggattcgaacccccgacccacggcttagaaggccgttgctctatccaactgagctacaaacacgtactcatcagatatgtctgatggaagcgggtgatgggaatcgaacccacgtatccagcttggaaggctggtgttctaccattgaactacacccgcataggaattatttagttgtcaaacgagataaaatacattttgcaaattttactcgtcatcgcgacactcgttaagttctcatgcaagcacggacttttactcgttgttcgcgtaagtcggggtgacaggattcgaacctgcgacctcctggtcccaaaccaggcgctctagccaagctgagccacaccccgttttgttcctcgtgttgagctctctcgctcagcacaaggagtattatagtgtatagtttgctaaaagtcaacacctttttttgaatttttttaattttttttattttcctgatttttccttatttttcaggatttctcgaggtatctgtgttcgtaatgtgcctttccctgttcatcaatttgcataacaagataactcggttttcgtcccggctggcgcgggtaagaaagactgcccggatttaaaactgtcagatcctcctcttcgtccaggtaaggataatgggtatgtccaaacattacaacctgtacctgacgactcctggcttcttcttccagctgacaggtacttaacgaaacaccgtacatatgtccatgtgttaccataatgcgataattttccagactgaatacttcttcctttggcaaatcgctgaaaaaatcgttatttcctctcacaaagaaacagggacattctacagcctccgggatataatcctctgatccttccagatctccgcagtggatcagcgcatcaatcggccattcccgctgcaggacacgcatcagattttcgtcatgtccgtgtgtatcactgactaccaaaatcttcattctgcattcacactttctttcagaatctccctcatcttttccagggcttttcctctgtggcttactgcattcttctgttcttccgatagttcagctgttgtacagccgaattccggtacataaaagataggatcataaccaaatccattctcaccacgttcttcatatccgatccggccttcgatcacaccctcggttgtctttatggttccatccggaaatgctgctgcgattgcacagacaaagcgtgccgttcttttttcatccggtacacctgtcagccgttcgatcagattggtattttttatcctgtaagaggtatcttctcccatatatcttgcggaataaattccaggctctttattgagatagtcaatttccagtccggaatcgtctgccagcaccagttctccggtcagttccatgatcgtttttgccttgatgatggcattttcctcaaaggtttttccgtcttccacaatatccgcttcgatccctgcctccttcatggacaggatctctaccggaagatctgccagaatctcccggatttcccgcatcttattctgattgcctgtggcaaatatcaaacgtttcatcgtgtctctccctctctgcgtttcggtggttttgggccaaggaactgatagtaataggtccggatcataccgttataaattttccggttcttatctgcttttcttccaatatagcgttctgcatcctggtaactggtgatcagatacatcgaccaggcatccagtttttcatatacctcaccgatctgacgatacagtccgggaagcatctctttttcttcaaggcgttcgccgtacggcggattggtaattataaatccatattttttcggatgacgcagtttctccacttctctctgctgaaaatgaatcagatgatccacgcctgctgccgctgcattttctcttgcattttttaccacttccggatcgatatcgtatccctgaagatccagactttcttccatatgtaccagatcctgcgcttcttccagcgcattataccagtgtttgcgcggaatcaggttcgtccagtcttctgccagaaaggaacggttcatacctggcgcaatattacatgccatcatcgcagcttcgatcggaaatgttccgcttccacagaaaggatccaccaggatccggtctttcttccacggagtcaacatgatcagtgccgctgcaagcgtctcggagatcggtgcttttgactgtaatttccgatatcctcgcttatgaagagatacccctgttgtgtcaattcccacggttacgatatctttcatcagtgatacgcgcaccggatagctgacaccatcttcttcaaaatgctctctgtgatatttctgcttcatccgttctaccatggcttttttcatgattgactggatatcagaaggactgaaaagtttgcttttgatcgaagaagcttttttcacccagaactttccgttttccgggatatattcttcccacgggagagctttcgttttctcaaacagctcatcataggtacacgccttaaattctcctgcttttaacagaactctctctgcggttcgaagaaacatatttgcataagccaccgcttcctcatctccccagaaacttacctttccatcttctaccttgctgatctcataaccaagatccaggatttctctttttaataccgcttccagtccgaagtgacagggggcaatcagttcaaattgtctcataaatcatattcctttattatttcttcatcgaatgttttgatggtgaatcgactgttttccagtattgcataggtaggtggattcccttccttcggaattgacacggaacccggattcaggatcgtgatatcccctactttttccgccctgagtacatgagtatgcccatgcatgaaaatatcgcccggttttaacggtggcagattatgttcgttataaatatgcccatggctcatatagaatgttttcccgtcaatttccatccagccataatctgccagtaccggaaattccagtaccatctggtccacttccgcatcacagtttcctctcacattatagatccggttcttttctttattcagcatccgaatcacttcttttggtgcatattccttgggaagatcatttcgcggaccatgatacaacaggtcccccagcagaatcagacgatctgcctgctctttttccagagcttccatcatttttctgcaataccaggcagatccatgaatatctgaggcaatcatatatttcattgacttttctcctttgtcagaggacggcagtaccgtcctctttttctacattttaaaatttacatagtaactgttcagtaccctcacagttacgtttacattatgctttattctactatgattattcggaaaacacaagatttcttcctttatattctgtaattcctcctgccacggaaagggcacggtatccctgtcgtatcatctcccggactgctgccatgctggtagctccccgttcacagtacaccacaatctctttttctcccggcagattccactcctttccaggttcataagggatgttcactgcgtatcggatatgtgatctgcggtattcttccccggaacgtacatcaacgatccagacccccggataacgggctacgtactggtccagctttcgtggagagaccagaggtatatccacaaccaaactccttttttcttatcttatgcacacgttccaccgaccgcacatccgtaatcttttatgtaccggtctgtcccggtggcaaattccgggacagactgttttttttactgtctgtttttatcgctgtaacggttggtgctgctcttgtcatagctgtcagagccataacaattttcttttttctgtgttttggcattctcatttttctcgtctgtcataccgtatttgtcagtttttttgctctcttcgccgtacctgttgtagtttttagacatgtgtatttcctcctgctcatccttgttttgtaaatgttccgttgaaccatcggtttcatttacagagttagtatgtcaaaaataagggactttattcatttctttgttgcattttcaaatgatctgtattataatcaaacctgtaaaaagaatttacccttcaaaaattttttttacaattaataaccccttattaattatttatactcccctcgaaaggccagtagctcccctactggtctttctctttgtctgaaaccatgtttttctgggatttgtccccacttttctgttttattattttctttctctgcaggaaaaaaagcagaagtttcgtttttttcacgtaacttctgctttttcttatttttgtttaaaatatgccacaaccaataaaactatcattaacgggatcaatatcgggagcagatgaatgagcactgtcccggctgcccacaggatcattgccacgaccacaacaaaaatgacagccgccagcaggcagcctcccctagtctttatttccatacgatgcaattctctctgtgcatcgccactctcctgtccgccccgttcctcataaacattggtctccggatggctgtactcttcctgcgtctcctgtacgtccaccagtgttttcgcaatcagcagaggatctccaagctctgtcagtacttcttcctctgatctgccattttgtatctgttcctgaatatagttttcataataacggatctgtgctgtcacttcctgttgagacatggtctgagacagccgtgcccgcagtttttccaaaaattcttcttttctcatcgttatcctcttttttctgtcactcatctggtcactgattgatggctgtactgaaatcctctatcttctgaagtacacgctctttttcacttccttccagaaccatgggctgataattattatacccagactccgaagaaagagaacaggggataatattggtcacatcgtcttctgccaatttcccgttttcaacggtaaatgtctgctgaaaaatcatcgtatccttatctgacggattcttgtttccgccaaagcagaagtttccaagactgtatacaatattttttccctgatatttttctattccctgaagaacatgtggatgatgtcctactaccagatctgctccctgatcaattgccagatgagccagtgttttctgggcatcgtccggaatgttcgatttttccgttccccagtggaagcttacaatgattacctgggctccctgattctttacctcctgtatggtatcaataacctgctgttgtctaccgatcccgtctttcagttcatagattccgatcagtcccactttgatgccttttacatccatcactgctgtccgatcatagccaaaagtcgtaattccggctgcctccagatactgaatcgtatcttcataactctgatctccgtaatcatgactgtggttgttggcaaggttggtggcctccacgccaccccgggtaaggatctctgtataagaaggatctcctttgaaagcaaatgttttttcctgtcgggcatcggaggttgtcagcgttccttccatatttgccacagtgagatcgtccgctgtaaatatttcttttacattctggaaaaagtatcccggatcgtttttcatctgataaaatgcatcaaaactggtgctctgatcaaagtttatatccgttcccagcgtacagtcacccaccgtactgaccgtgatagaaaccggttcacctgtcggttcgggtgtcgttggttcattccgggagtctccggacgtactgtccgcagaattgtcatcttccgatgctattttttcttcctgctgttcttgttttgcatttttttgatccgtctgtgcctctcgccgattcagcgctttggtaagtgctgctgctcccacaagaagtgccagaaaaatagcaacggtgatggctccgatctgcatgtacacaattttttgtcgatgactcaatcgccgtctcctagatctttttctttgccgttttttatccattttatcgccaactttctgtctgtactctttgcttcttctgatgtattgtttttccatgcttattcttcatgatacctgcttttgtctgaaactgcaagtattccacttcattttccgtttacttttttctttcagatgtttataatatttgtaacattcttcgtaactattcagtaaccactgtgccgcgaggtgttttggcacgtaactgtgaaggtactgaacagttaccattcttcacagaaaggtaaatgttttatgaaaaaaacaaacccatatcaggtcaccgaatggtaccgttctgtcatccgtacacaaataaagccgggggatctgtgtatcgatgctaccatgggaaacggccatgatacattatttttaagccagctggctggtccgtccggatgtgtcctggcttttgatattcaacaggctgcccttgattccaccaaagcacttttacaggaacacgaacatctggcacccgtacagcttttactggacagccatgcacacatgtcttcttacgcagacccgggaacggtttcctgtatcgtttttaatcttggatatcttccttcgggagatcattcgatcgccacccacaaagagtcaacaattgtagcactggaacaaggactggaacttttaaagacaggcggatgcatcagtctttgtatttacagtggaggtgatagtggctttgaggaacgggacggtgtactggattatctgaagggattggattcaaagaaatatctggtggtactttcctgttattataatcgaccgaatcatccgccgattcctgtgataatttataagatgtagagggaagacggaaagttggtaaaaaagataccagagtcaaatggtctgaaatcttcctgcaagcaagcctgcatcagatttcagatcttttgactctggtatcatcattatattggatccagaggaaatcctatggtgattttggttccctggcccggctggctttcggttcggatctgggcatgatgaagggctgcgccgtgttttacgatagacagtcccagtcctgtaccgccggtctgcctggaatgacttttatctacacgataaaagcgttcgtaaactcgctcctgttcttctttggcaattcctattccggtgtcctccacctgccagtatattttatctgtagttttccacatccgtacccataatattccatgttccacattgtacttaataccattatccatcagattatacaacatctcatataagatctgacgcacacctgtaatttcctgtgttgctccttcgattttcatcgtgatatcttttttcttggccgcatgatgaagggtagctccgatgtcttccgtcagttcatagagatccacaacttcttcctgcatctgactggttccttcttccagttttgataactggataatatcctgtaccaatgcagtaagtcgattggcttcctgatggatcctggaggcgaattccggaatgtctgccggctgaaccatgccattttcaatcagttccgcatatccggagatcgacatcagcggagtttttaattcatgagatacgttagcagaaaattctctccgcatctgttccgcggcatttttttctgtgatatcccacaccataattactgcaccatacgtttttcccgttacctttaccggattggcaagaagctggtagaatcgtccatgagtttcaagcaccgtctcgatatgctcgcctgccaatgctccatccagtgcttttttcaattctttattccggcttacacggctgattggtcttcggatacagtcgctcgcctgtacctggaacagttcctgggccgctttgttgatcgacaatacttctgtctgacttgcaaccacaagaccgtctttcatattttctgtaattgccagatattcttcatgacgttctttcaattcctggatctgtccggcaatctgtctgttctgttcatgtacacgcatcagaagcggccgtaattcttcatattccacatgtcgcagcgggtgttccagatccatcgtattgattggttccactagtttttttgtctggttctgaatcacaaaaaacgctattccaatgattgccaacaccaaaacagccaccagtgtaatccctgactgcagatacccaagaacagaatcgatgcttcttgatacacggagaatttttccgtcctccagcaggatagcgtagtaaaaagtctgtttgtccagtgtttccgaatatcgcagcatctcaccggagccttttttttctgcttcctttacttctgggcggttaccgtggtttcccatggcagatgcatcttccagcgaatcgtacaacaccgtaccatccgtatttaacagtgtgatcctgttatccgacttcagactgctgattttctcattcagatagtcgccttccgtttcctcaattgctactctgatgtattccgcttcttcccgtacactgtcgtgcatgtatccgttaaatttactgtacattgtcaggctgacaactaaaaaggtaagcagaatggagaccgtcaaaaggactccaacctgctttaaaattttctgtctcatgcttcgtctcccatacgataacctacaccacggacagtttcaatacatgcacctgcttcgccgagtttctgacgcagagtacgtacatggacatccacagttctggtctccccatcaaaatcgtatccccagattctggtaagcaactggtcacgtgtcaggacaattcctctgttttccaccagatattttaacaattcaaattctttcagagtcagttctaccttctgtccgtgcaccagcacttcatggcgctgaattcgaatctggatcggaccatgaaccaatgtctcctccgtccggcttccccctcttcgaagtaccgccttcacgcgggagataaattccatcatgccgaatggtttagtaatataatcatccgcaccaagatccagaccttttactttatcaaattccgcaccttttgcagtaaccataatcaccggaacatcacgtacttccggcatctgacggattttttccaaaatcgtataaccatcgtctcccggaagcatgatatccaacagtatcagatccggaatcagattacccaattcttcaaataactgtgtaccattttccagtcccttagcctcaaatcccgtggaatgcagggtatacaccagcagttcccgaatgtttctttcatcctcaacacagtaaatcatatgtctctcctatttttatggcagtaaatacttttcttcttcttctaataccagtccgcggaatatctcactgtcttcattttttacactgttcagatatccatgtgtatcataagtatcttctcttacctgtgtcacgcacaccgcaatattggaacaatgatctgccactcgctcgagactggtcgtaatatccgaaagaataaatccaagttcaatcgtacattttccctctctcagtctgtggatatgacgctttttcacttcctggttcagctcatccactactgcctccaacggttctactttctgtgccagtttctcatcctgatcacggaataccgcataagctttctctacaatatcctgcaccgctctgctgaaaactttcaactcttcttctgccttcggagaaaatatcagctttttatcatgcatctcctgtgctgcctccatgatgttgatcgcatggtctgagattcgttcaaaatccccgatacaatgcaacacgatagacagcgtatgactatcgcggacactgagattctgtctggaaagttttaccagatacgttcccagttcatcttcatactgatctaccagattttccagctcacctaccttttttgctccatcctccgtataattccacaggagatccatagcagtgaataaggttcgcttggattcttccgccattttgtttgccacatgaacactctgttccatggcaaacgccggtttttccagaaatctggaatccagaagctgtaattcttttctttcttcttctacttccgccggctgtacatcatcacggatggtaagacatgcaagtttttccagtcctttgccgaacggaagtaacagcatcgtggcaaatacattaaacagactgtgtatcacagcaattcctgctgcatttgttgccgtgccaagaaaggaaaatccaacgactgcattgaccgtgtaaaagagcaccatgaaaacaaccgttccgataatattaaaatacaggtgtaccatggcagcacgctttgcgtttttagttgctccgatacttgataacagtgccgtcacgcaggtaccgatattttgtcccataatgatcgggatcgcgaccccatagcttaccgctccggtcacgcaaagtgcctgcaggataccgacagaagcagaagaactctgtatgatcgccgtcagcactgctccggctatcataccgaggaccggattggaaaacgctgtcaaaataccggtaaattccggtacatttgccagcggtttaaccgcatcgctcatggtttccataccaaacatcagcacagcaaacccaaccatgattgctccgatatcctttttcttttcctctttaataaagagcagaaaaatcacaccgatcactgcaaggagcggtgaaaaggaactaggtttacataattttacaaagacgttatctccctgcaacccggataaactgagaatccaggaagttacggtcgtaccaatgttggcacccatgataattcccactgcctgattcaacttcataatacccgaattaacaaatccgacaaccataacggtcgtcgccgatgacgactgaatcacagccgtcacaccggcaccaagcaatactgctttgatcgggttagatgtcagattttccagaatcctctccagctttccaccggatacttttgccagcccatcccccataacctgcataccgtacagaaacagagccagtcctcctaccatcgttaatacactgaatatgtccattattgtcctcccaatgtttttcttttgatggcactattgtattaaatccctgttaaatctgttcacggtcttttgttaaatctatgtaaagtgagaaggaattcatttttccttttttctgctgttcccgttattcacccgtatagctcaaatattcaatttttttcaatatatttttttacatcatggtatactttttctttttcacgctcattcagaatctcatgacgcatacccggatacaattttccttttgtatccatatatccgactcgccgcatcgtctgtactgcctgggcaaattttcttgctccgccaatacatgggtcttcatatcctccgataaacaacaccggcagatccggattgaaaagtttccatcctgtttcccgatacgtctcatccattagttgaaacagtacctgatccgcatccacggtaaaagtaaatccgcaaagttccgaggcttcataagcacgcacaacctgttcatccgaacagcaccaggcaaagcggcttccctcacctacaaacttcccggaatagcttcccagagaaagcagttccagaaaacggctgacatggtgtgccccactgattttttcctgtacagcagccagtgcaatccctatttttgctcccggattctttgatggcgatccacagaccaccaacatattcaggagatcatcgtatttttttgtaaaacagcgaaccaccatagaacccatgctgtgtcccagtaagatcaacggtactccctgccattcttctttcaacattctggttacttcagccgtatcctcgatcaacgcatccataccggcaccatacatataacccagatcttttttcgtccgtacactttttccatgtccacggcagtcatggatcgccacaacatatccggcttctgcaaaatacttcataaatggaagatagcgttctttatactctgccataccgtgatgaatctgcaggattcctttcggtgcttcttccggaaccagtatcagcaaatccagttccagtccgtcaaccggagatttcatcttctttgatatctttgtgtattccatagcattcctcctgactttttatatactctcaacttgcgacatctaccttatacgccgcagtacgcatcctcgcggagccttttttacattacaggaaatcaatttcctgtaatgtaaaaaaggctttgtcatcactgacaaagcccttgttctaagcacgagacgggattcgaacccgcgaccctcgccttggcaaggcgatactccaccactgagccactcgtgcatatccttgttctttcgaacaaagatatcatactataaattccgacacctgtcaactaaattgttgtaattttttgtgttttttcttcaaatcaatctatttactgttttaagggcgcaaaattgcactcagcacatactgattgttctgaaaatttttctggctcagttcatccagacgaatcagatccacatccaaccacatttcttctgccgccgtcatcatattggcaaacataataccaaaatttacctcatcccattttcccagtttatcacttggatgtttcttggagaaaatatggattcggctgtcaaaaactacgaaacgccacggctggctgttcatacttgaaggtgccatccttgctgcatccagtaactgtttcatccactgtctcggtgtttctttatatacacacaggtcatccaaactcaacctcttcgcttccgcctgtttccgataacagcttccctttggctttccgaatgccatcaccaccatcatccgctttttatcgcgatattgatattttttcttaatgatcggattgccgataaaacagcttccgattcctctggtgtacatatataacgaaagctgctccatcagataccctgcgttcatcatcgcacggtctttttcttccgaatacaacaccagataatatggtgccttgattccaagaagactgagcatcttataatcattctgtcgattgtcaaaaatcgccagttccgtctctactcctccaaacagcccgttaatttcatcaaattgtttcagaatgtcttccagaactttcgggctgatcccttcatttgtataactccggacggatttccggacaaaaattgcttcaaataagttcatgttatcacctttaattttttcgtaacactattgtaacatgttttttctgttttgcaaccgcttccggtacttttttatgcgttttttatttgtttcccctgtcttaagatgcaagaactccaatctgctgctgtacatctgccttaaactgttcccaggcatcttcgtgttccacaaaatatttcggacagatttttcctgtcacatcataatggcggatcacatcctgacttgtaagtccgaatctgttacacagccaggctgtcagctgtaccatcgactgataagtcactgtgttaaaagcacctgtatcatccgggtgacagcattcgatggatatggtatccccatttcgatcattagaagcatatgcaatttccgtagttggtatacattgcacaacttccccctccagccctacaataaaatgactgctggcttttgtggtatgtgcatctttaagtccctcaaaataatccctgtttgccatggcgctgcttcccggattcgcagtatagtgaatcacaattccatttacctgtttcagtgcggttcccggtctggaatattcgttgacatccagcagttccacatccagttccggtgcgcctgtccagtcaatctgtccagtctcctgtaccatattctttcccgtctgcgaaaaaaataattttttgcataaaaatatcagaccaataatacataaaaaagcaatacacagtacaatcatcgatcgtcggatcaattgctgtcttcttcgctgtctcgtcatccgtcttctgtgaactgttctgctcccctgtcggtttctccccccagttcttctcccactcataacacttctcctgtatacccaaaaaggcggcctccacccctgagaccgcctgctttatttattcctcgtaacggttcagtaccttacggatgcttctccactgaatagttactactcatcaatgctatagtttggtgcttcttttgtaatatgaatatcatgcggatgagattcttttaaagatgctgcggaaatttttacaaattttccggtttcttttaatgtctcaatatcttttgctccgcaatatcccataccggaacgaagtcctccgattaactggaataccgtgtcttccaggtgacctttgtatgcgacacgaccttcgacaccctccggtaccagtttcttcgcatcggtctgaaaataacggtctttacttccgttctccatcgctgcaatagatcccataccacggtatactttatattttctaccctgatacagttcaaagcttcccgggctctcatcgcatccggcaaacatgcttcccatcatacatacgttcgctccggctgcaatcgctttcgtcatatctccggaatacttgataccaccatctgcgatgatcggtacaccatattcttttgctgcattataacagtccataacggctgtgatctgcggaacaccgattcctgcaaccacacgagttgtacagatggatccaggtccgatacctacttttaccgcatcggctccggcttcgatcagatctctggttgctgcgcctgttgcaacgttacctgcaatcacctgcagatccggatattttgctttgatctgacgcagtgttttaaagatatttgcggaatgtccgtgagcagagtcaataacaataacatcgactttcgcttttaccagagcatccacacgctctagaacatttgctgtgattccaacggcagcaccacagagcagacgaccattttcatcttttgcagacaacggatatttgatctgcttctcaatatctttgatggtgatcagacctttcagattgaagtcatcatctacgatcggcaatttttcttttcttgcctgtgcaagaatcttcttggcttcttccagagtgataccctcttttgctgtgatcagtccttcggatgtcatacagtctttgattttctttgtaaaatcttcttcaaatttcagatcacggttagtgatgataccaaccagttttctgccttccgtaatcggtacgccggaaattctgaattttgccatcagattattggcatcttccagtgtatgttccggtgaaaggaaaaatgggtctgtgatgactccgttctctgaacgttttaccttgtccacctcatcagcctgcgcctcgatagacatgtttttatgaatgataccaatacctccctgtcttgccatggcaatcgccatacgatgttcggtaactgtgtccattcctgcactcatcatcgggatgtttagtttaactttttttgttaaatgtgtagataaatctaccatgttgggagtcacttctgaatactgaggaaccagtaacacatcatcaaaagtaattccgtcaccaataattgtacccatttttttctcctttcgtatgctttacattgttgagaattagtttagcaaaaaacaaccgtggtgtcaatgttaatcaaagaacactttccgtggagctttcagccgaaaatctttgaccatatgttccgatggctcaaaaagtactttcagcagtccttctttttccggaatcaccatggcataaaccagtttttctctctccggattacaggatgaatagtcgcatacctttaatttctggttattattataataatcaaacctgtgagatgctgccggcgcgatcagttctgcttttgagatatcataagatgccattcgttttctctttgccttgtttatgatacgatccacatccagttccccgttgacatactgatattcccattcggtctgaaatctcggaaaaataaagatgtccgccacgcagatcgcgatagaaaccgcaataatgatcaggttccaggtaagaagcgacagaacaaccccgatggcagtgagtgccatcagtacataccgcagtgcctgatctgttcctgttttccttctttttaccagttcttccaaatacaaatcactcatttttgtcctccttcgttttcatcaggcgtgtttccatcacccataatatatgtaataaatgatttggcttcatcgagatgatccgaatagacaagtactcccatatatgaatcttcatccactccaaaagactgaagtactttgctgtctcccacatgcagtccgtactctgtcaaatcatctttatatgcttcctgctgttcatccgtaagaagttccgacatcggataaaaaccatcctgttctacatactcctgaaatttgtattcaggtgcaatcaatacatctacctgctgtgcaccgatgatcgtggacaatttcataaccatctgatagtcttcctgatctttcatcagatacatggaattatcaatagtatattcatgatatttatctgtgtcaccggtataatttttaaaatcttctgcaagcgcctctccgtctccggctgttccgttaatgattgctgcataaaaaactgtatcgaactgactccgataaagcatctgtccgataaaaacaataagcaaaataattcccagcgccactgccatatgtggcttatagtaagcccagatatattccagtttctgcccggctgtcatctgtttcagtttttttcgttccagttcccttttttctttcggggtcatgtcgctttcgtatcgtttctgttccatccctgttcctttctgacgccttacttttctttcctcctgcccgctgtgatacccagtcagattcattttcattttaacacaaacaggagccgccgtctatctggtcagctcctgcttttcttaaatctttatgaactccggtgactactcagcagacaccgaacagttatacaattcttatcttaccttcgtaaattacatcattcccattcccgggttacctgccggtgctgccggtgcttcttccgggataatagatactacagattctgttgtcagcaaagtagatgcaacactggtagcattctgcagtgcacttcttgttacttttgccggatccagaatacctgcttttaccatatctacatattcttctttgtatgcatcaaatccaatgccaacttcggattcttttactttgttgatgattacggatccttccagacctgcattggcagcaatatggaacagaggagcttccagggctttcatgatgatctgagcacctgtcttctcgtctccttccagagtatcaaccagttcctgcagaacttttgtcgtatggatgtaagcagaaccaccacctgcgatgataccttcttctacagctgctttggtagctgccagagcatcttccatacgcagttttgcttctttcatttctgtctcagtagctgcaccaacacgtacaactgctacaccacctgccagttttgccagtctttcctgcagtttttcacggtcaaattcagatgttgtctcttcgatctgtcctttgatctggttcactcttgctttgatagcttctttatcgccttcaccatcaacaataacagtgctttctttctgaacttttacagatttcgcgcgaccaagctgttccagagttgcttctttcagatccagtcccagttcgtcagagatcacctgaccacctgtcagaatagcgatatcctgcagcatttcttttcttctgtcaccataaccaggtgcttttacagctgctacagagaaagttcctctcagtttgtttacgatcagagttgtcagagcttcaccttcgatatcctctgcgatgatcagcagtttggaaccggactgtacaatctgctctaacagtggcaacagttcctgaatattggagatctttttatctgtgatcaggatatacggattatccagagttgcctccatcttatccatatctgttgccatatatgcggaaatatatccacggtcaaactgcataccttctaccagatccagttctgttttcattgtcttggattcttcaatggtgataacaccgtctttggaaactttttccatcgcatcagctaccagtttaccaacttcttcatctccggaagatactgctgcaacttttgcaatctgttcttttccttctaccggtttgctcatagaagcaattgcttctaccgctttatcggtggcttttttcatgccttttcgcagaacaatcgggtttgcacctgctgccaggttcttcatacctgcatttaccatagcctgtgccagtacagttgctgttgtagtaccatcacctgctacatcattggtcttggatgcaacttcacggatcagctgtgcgcccatgttttcaaatccatcttccagttcgatctcttttgcaatcgtaacaccatcgtttgtaatcaatggagcaccatatggttttgccagtacaacatttcttcctttcggtccaagcgtaactcttactgtatcagccagctgatttacacctctctccagagctgctctggcttctgctccaaatttaatctcttttgccatgattttttcctcctgattctatctctctttttctttctgaaaatcgattattttacaacggcaagaatatcattctgttttacaatgatatattcttctccgtccagctttacttcagttcctgcatatttggaatagataacctggtctccaaccgcaacttccatctttacttcttttccatcaaccattccgccaggtcctacagccacgacttctgcctgctgtggtttttcctgtgcctgtcccggtaatacaataccggactttgtggtttcttctgcaactaactgttttaatacaactctgtctcccaatggtactaatttcatatctatttgcctcctttaagcgtataacctgttttattagcactcgtttgtatcgagtgctaccgatggtcttatattagtaattttgccctgttttcgcaacttcacttttcgctggtatttttaatatattctctcatttttaaatatatactcattttttctcttattttctcacttttctatattttttccattttgtcatcttttctcagatgcaaagcaataaaaaagaaagaagaccaggaggttctccttttctccttttcttctttcttctgtccttttcttttcagctgttgttgtatcagtcgtccttttctgtcactttcagattctttctcgctttcagttcttcaagttcatcaaagatcacatcattcaacactttgatgtacgttcccttcataccactggatctggattcgatcacaccggcactctcgaattttctaagagcatttacaataactgaacgtgtaattcccacacggtcagcaatcttacttgccacaaggattccttcatctccgtccaattcatcgaaaatatgaatgatcgcttccagttccgaaaacgagagtgtgctgaacgctgcttttacaacgtgaacctttctggcttcctctgcattttcttcatttacggagcgcatcatttccaatcctactactgtcgttccatactcactgacaataatatcctcaatatcgtactggcgttctttccggtacataaatacagttccaagacgttctcctgcaatatcaatcgggttgataatcgcacaatattgctggatatcatccctctcaaatcccagagtctgaagattcacattttcctttgtggacaagacgcttaaaaaacggtcattcagaagcggatctacatgacttccgactttatcctcaatcaattctgtgatttcttctactcccgggcataaactgacaccaagaacttttcctttcttactgatcacaagaatattggaatccaatgtttccatcattactttgcagatatcattgaacactacttttgtagaattattattgtgcagtaatttattgatttttctggttttgtccaataactgtacgctcatcttctactcctttctggattttttgttttttttatacttttataatattgtaccatgatattctttaaataacaataatattttctgaatatttcaattttttcatttattgtgactgttttatctgcctaatcaaaaccatgaaaactaaaattgatccaccggaccaattattgatatgcaatgcaacagaaaattaaaagatacagattctttgccgaaatctgtatcttttaattttccgttgcacagtaatatttatttttcgtaactgttcagtaccttcacagttacgagcaaaaatgcatttaaacgataaaaacacgctttgcgagtttttatcgttatcgcggcactcctcaaggttccgtgcaagcacggactttgactcgttgctcgcgtaaatcaccttcggtgatggcatttttgcttgtatgtctcgggattttggcatatttatgccaaaacacctcgcgggataatggctactgaatagttactatttttcttttacttccacatacccgcactgctcgtccgcgcagacttttttgtttcccttttctaccatgtaaccgccgcatttcggacatttttcattgatcggttttgcccaggacatgaaatcacattccggattatcctcgcagccgtaatatttccggcctttctttgtcttgcgaagaactacttcttttccacacttcggacatttgacaccgatcttttccagatacggcttggtatttctgcaatccggaaatccgggacatgccaggaatcttccatgcgggccatatttgattaccatgtttcttccgcagttttcacagattacatcagtgacttcatcttccagtttaacttcctcgagatttttctctgcttctttcacagattcatcaagatccggatagaagttccgaactaccactttccagtctacggttccgtcgcccactttatccagcagatcttccatcgtagcagtaaagttgacatccacaatacttggaaaggcttctttcatcatctgattgaccacctcacccagttctgtcatatacaggttcttattctcttttgccacatatcttcttgcaataattgtggtgatagtcggtgcataagtacttggacgaccgattcccagttcttccatagtttttaccagggaagcctccgtataatgtgccggcggctgggtaaaatgctgctgttcatcaaatttctgaaaattcagaaccgtatctttgtcaatgcttcgtaccagtgtattgttctgcgctttctcctcatcttcctgcacataaacggacatgaaaccatcgaacttgatcttggatgcggcaaccgtaaacaggtattctccaccggaaatctttacagatgttgtttcgtatatagccggctgcatacggcttgccacaaatcgtttccagatcagctgatagagacggaactggtctctggaaagagattcttttacaagggccggcatacgggaaacatccgtcggacggattgcttcgtgtgcatcctgaatgttctttccttctttttgtttactctcccgcactgccacataggattctccgtaatgttcgccgataaagcttcttgccattgcatctgcttcttccgagatacgggtggaatcggtacgcaggtaggaaatcagagcaacagtaccctgtcctttgatatctactccttcatacagctgctgagccagacgcattgtcttctgggtagaaaagttcagtgccttggaagcttcctgctgcaaagtgctggtagtaaatggaagcggagcttttttacctctctctcccttttttacttcactgacctgataagatacacctttcagttcttccatgatgcgatctgcttcttctctggaggaaatcgtcatcttctctttttcttttccgtagaactttgcaaccagcggtttcttttctcccggaattttaaatacagcatccagtgaccagtattcttccggaataaatgcattgatttcttcctctctgtccgctataatccgcagcgcaacggactgtacccgaccggcactcagtccacgtttgatctttttccacagcaccggactgatcctgtaaccaaccatacggtccaggatacgtcttgtctgctgttcatccaccagattcatatctatgtctctggcatgtttgatcgactctttcactgcgcttttggtgatctcattaaaagtgattctccgcatctttttttcatccagcttcaatgctgttgccagatgccaggaaatcgcttctccctcacggtccgggtcagttgcgagatatactttatctgccttttttgcttcttttctcagacttgccagcaattctccctttccccgaatcgtaatatatttcggttcataatcattctctatgtcgatgcccaactgacttttcggcaaatcccggacatgtccgttggaagctgccacttcataattgcttccaaggaacttttttaccgtctttaccttcgcaggtgactccacaatcactaaatatttagccaatgttttcctcctgattttttattatgtgcttcaaaagcacatgtattgccgtgcttttatgcccacctcttttctgtgcggatataataattctgccagacttcgcaggccagatcttttgctgtcagatagtatagactcttcaacagacttccggatggcagtcctgtctcgtcctgtaactgtgacacggcttttgggttcaaatcgagacaactatacaccaaatcatcttcccttgcaagcactatttttttctcctgtgtaaaatcctcctgtattatttccttctttcccgtccattccatctcttccagaatgatctccggcttccatgccgggatagctccctggtagattaaccggttacatccttcactcaaaagatcacctgcacgccccggaagagcgaaaactgtacgcccctgttccagtgcggcatccgcagtaatcagagaaccacttttctcttttgcctcaaccacaagtatcgcctcggagagaccgctgatgattcggttgcgcagtggaaaatgataggaaaggggtggtgtcccaggagcgaattcggacaaaatgccgccctgctgctgcatgatatggtaaagcttcctgctggatgtaggatagcaaaaatccaccccgcatcccatcacaccataagtttttccccctgctgccagggctcccgcatgagctgctgcatccacacctctggccagtccgctgatcacctgtattcctgtttgagtcagaattctggcatattcatatgccatattttttccataagaactacagtttcttgctccgacaatggcaatcgccggccgcataggatccggtaattctcccagcacatataaccgtgacggtgcatccggaagttgtaataaagttttcgggtagccttcttctgttttcttatatatttttatgttctcgctcatcatttatccccctatttccatgaatgtttgtcaaaacttcgatatccgattgcttctgcgatctcttcttcttcaatctgttcttttcctgccagatccgctgctgtcctcgccacgcgaaggatccggttacatgcccgtccactcagatgtaacttttcaaaagctccctgtaacattttttctgcttcttcacttgttttgcaatatgtactgatctcacccggcggaatctggctgttataacagattccggattcttttaaacgttctttttgtattaaccgggctctctctacttcttttcgcatattttctgtactccactgtatactgtcactgtcaggtatctctcccctgaattcaccataagttgccgcattggtagtcacacaaatatccatccggtcaagaaaagcctgactgatccgctgctgatatcttttaatctcatgttctccacaatcgcagcggtttctgtccggatagtagccacaggggcagggattcatcgcacccaccagaagaaattctgccgggaaactatatcttccccccacccgcgcaatatgaatttctccgtcctcaagcggctgtcggagaatctccagtgtctccctcttcatctccggaagttcatccaaaaataagacacctttgtgtgccaatgtgatttctcctggcatcggtatctttcctcctcccgcaagcgcctgcggtgatatggtatgatgcggagaacggaacggcctgtttgatacccaggggacttttgaagataataatcctgccacactataaatagaagtaatttccatcgcctcctcatgactcagtgccggaagcaaaccgggaattctttttgccaccattgtttttcctgaacccggaggccccatcagtaatatattatgaaaaccggcggctgcaagaagtgcccccctttttgccgcagtctgtcctttgatttctctgaaatctgctgttatttccggtgcaatctccatcttttccctttctttctccggatgttcccatgtccgttctctcactgtccgcataaactctcccagattcctgactcccacgcttcgaatcccctggatcatctgtgcctctctccggttttcccatggaacaacacacccctgacatcctgatttcctcgcctcttcaaccatcgcaagaactcctctcacttttttaatctgtccgtccaaccccacttcgccggttaccatgacactctcaagtccccctttcggaagctgccccagagattccaggattgccgcagtaatcggaagatcaaaaccggttccggcctttggtacatctgccggagaaagattgatggtaattcttcttggcggaaccggtatctccagattatgtaatgctgttctgacccgatcctgtgcctcccgaacctgactgttcactgtccctaccatggaaaatccgggaagcccgggactcacatccacctccacctgtaccggaatcgccctgattccctgcatcgttgccgataatatacttgtatacataaaatattctctcctttctctgcgttatatcactgtaataacggttagcactgccatcaccgtcttgttttttattggtaactgttcagccccttcacagctacggggcaaaatacctcgcggggcagtgtttactgtatagttgtctttattttctgtatgttgtgggattatatattttgatatgctctgattctacattttgggaaaagcacatattcttccgccagggcataaattagaaagaaagccctttgaggtgtgtatgtgaagacctttctgaaacccctcaccacacaagaagaaactttctatcttcgtaaatgccgacagggtgataaagctgcccgagatgtgttgatcgaacgtaatctgcgactggttgcacatattgtaaaaaaataccagggggttgatgaagatctggatgatttgatttccataggaacgatcggtctgatcaaagccgtgtccacctatgatatgacaaaaggcagcagacttgctacctacgctgcccgctgtattgataatgaattgttgatgatgcttcgcagccgaaaaaaattttccagagaagtttccctgtacgaaccgatcggtacagacaaagaagggaacgagattcatcttctggatattgtggaagctaacgaacaggatatcactgatcagtgtatccataaggaacgaattcttcaattgtatggttgtttgagggaagttctttcaccattggaatatgaagtaattaaataccgctatgggcttttcggtgaaaaagaattgacacagcgggcacttggaaaacggctgggaatcagccgttcctatgtctcccgcattgaaaaaaatgctgtattaaagctccgtgaccggttcttttctacgtaaaatatcatatcgatccagtttaattcccagatcaatataaagaatctgcttcggatgtggtgcactctccatctggttgccttcctcatcctgaatactttttactgtcacttcgatgttatcgccatttggcttcataacttcgatctgttctcctacagagaacttgtttctctgggagatacaatattttccttcttcattggtctctcccacaatacccagataagtatattctttaatatacgtattattatcataaatctgtgcttcctgagttggttttccgtaaaagaatccggtggtaaattgccggtaagtacagttggaaatctgttcctgataccatgacatatttttctcatacagtgccggatctttcagatagtcatcgatggctttccgataggtccgggcaactgttgccacatacaacgcagtcttcatacgtccttcaatcttaaagctgtcgattccggcattgatcagatccggaatatgttcgatcatgcacaaatccttagaattgaaaataaaagttcctctttcattttcatagaccggaaaatactctcccggacgactttcttccataacagagtacttccatcgacacggatgagtacatgctccctgattggaatctcttcctgtcagataattgcttaacagacatcttccggaatatgagatacacatcgctccatgaataaaagtctcgatctccatatcttcaggaattctgcttcgaatctcgcgaatctcttccagcgacaattctcttgctgtcaccactcgcttggctcccatctgataccaaaactggtaggtaccataattggtgttatttgcctgagtactaatgtgacgttcgatctcaggacatacttcttttgcgatctgatagactcccggatccgaaataatcagtgcatccggtccgatttcccggagttcttcaaaatacttccggacgccctccagatcctgattatgtgccagaatattagctgtgacgtatacttttacaccatgttcgtgggcaaaccgtaccccttctgacatatcttcttttgaaaagttctttgcttttgcacgcagaccgaaagcctcgcctccgatatagactgcatccgcaccaaatataaccgcaacctgcagtacttccaggctgctggccggaacaagtaattccggaattctcatgattctttctcctatcgtttcgtgctgatcgcaaccccatctccaagtgggagcagggaagttaccagctcgtcattgtgtttcaattcatacagatactcacgcatccgcttatagatggtccggtttcttcgttctaccgcaaaccgtgactcaatcagatcgccttcctgcaagatattatccgacactaaaagacctccactctttaagagtcgcaacacttccggtaaaaaatgaagatactgtcctttggctgcatccataaaaataaaatcaaagggttcggtgagcgtgggaagaatctctgctgcatctccctccagaagttcgatctgctcctctttacccgcttttttaaaattatcccgggcaatcgggatcctcttttcgtaattttcgatggttatgatctgacagggttccggattatattcacacatcaacaaggcagaaaaaccaactgcagtgcccacctccagaatccgtttcggtctggcagctgccatcagaaactttaaaaagctctgcatttcccttcttacaataggaaccgcatcttctcttgcttctttttccagctgttccaggaattctgtatgaccttcgtccagggaattgataaaagtcaccatacgttcgtctacgatcatgagacactctcctctcctgactctggatcttcctcatcggaactactgctttcttcttcctcagacggctgtccctctgtgtttttccctgacagaatggcaagcatctcatcaactgtctcatgcgtattcaaaagataagtaccaggcttgatcttaccacgataatcggagagtttttcctgtgcccagaagataaccggtcgttcaatcaatcctttttcctgcagagtttcccccacatcatagacagaatcgtcttcatgaacaatcacagttacatcctgcccatctgcctgtgtatgagcctccggttcctgatagaagatcagatacccgaaactgtatgccgtttttccaacaaaaatcaggacacagatcagcaaaacatagagcagaatccgaatcgcccccttggctccacttacggcaacctgatacgttgcatcttttttctttttcttactacccatctatactccttgcttatccttcccacatataacgcggggatgtccggcagtgtgatcatacattcgggatattcagatcaatcccgtttcgaaactgttcctgtacctgctgaagcatccgacagacatccagctccgcctccagatatgcattcacctccggaactttccgaagcttttcatatctgttttctacttcatctgtaatatcgtacaaatctgcctgtgtatcgtcattgttcatatgaaagacagctacacggaattcatcaatctgttttttcagctccggattggatttcagcatctcctcacatgcaaggtacctctgatatgcggaatcctctctgattacttccagcagtttttccacgcactcctgtatcttgttcatgtatcttacgcctccattataattggcagaatcatcggttttctcttggttctcttccacaaaaaatcaccaagcgaatctttgatcacgcctttcatttttccccagtcagaaattcttcgatccaggcaggaatcaatggcatcttctacaacactctttgcctgtcccatcagatcttcggactctctcacatatacaaacccacgggatacaatatccggacctgccagaagctggttactgtatttttccagtgtcagtaccacaatcataataccgtcttctgccagatgctgacggtcacgaagtacgatatttcccacatcgccgacaccaagtccatctaccaggattgctccggtatgcactttaccggtaatttccgcggattcatcatttaattccatcacatcaccggagtgcatgataaaaatattttctttcggaatacccaggctctctgcaatacctgcctgtgctttcagatgacggaattctccatgaaccggaatcgaatatttcggttttaccagagagtaaatcaatttgatctcttcctggcaggcatgtcctgatacatgtacatcctggaaaataacatccgcacctttggctgacagttcattgatgacacgggatactgctttttcattacccggaatcgggttggaactgaaaataatggtatcacctggtttaatggaaacttttttatgaatatttgctgccatacgggacaaagctgccatagattctccctggcttccggttgtgatcagaaccatctgctcatccgggtaatttttcatttcatcgatatcaatcagtgtgttgtccggcacattcagatagccaagttcagacgctgttccaatgacattgaccatacttcgaccttccacaactacttttcttccgtatttgtaagcagagttgatgatctgctgtacacggtctacgttagatgcgaacgtcgcaatgatgattcttgtatttttatgctctgcaaacagattatcaaacgtttttcccacggtacgttctgacatggtaaatccttttctctctgcattggtactgtcacacatcagtgcaagaacaccttttttgccaatctctgcaaaacgctgcagatcaatggcatcgccgaataccggtgtataatctactttaaagtcaccggtatgcacaacgattccggcaggagaataaatagcaagtgcagaagcatcctgaatactgtgatttgtttttataaattcaatccggaaacatcccaggttgatcgattgtccgtgtttgatggtttttctttttgtggtacgaagtaagttgtgttcttttaatttattttctatcagaccgatcgtcagcttggttgcatagatcggtgcattaatttctctcaaaacataaggaagagctcctatatgatcctcgtgtccgtgagtgatcacaaaacccttcactttttcataattatctttcaaataggtaatatcagggatgaccaggtcgattcccagcatatcgtcctccgggaacgccagaccacagtccaccacaataatactgtcttcgtattcaaaggcagtaatgttcattccaatctgttccagtccgcccagaggaatgattttcaattttccaccgttactttttttcaaatagcacctccgtcactgcttacatctcaatatccacatcatccatcatctgactgaacacttttgacatggcttccagttccacgtcatcttccaccatcacataatccgcttccggatccgtctcctcagaagagtctttcaggatgtaggcgttagcttcatcatccatggagtctgttaccagcagataatctgtaccgttcactctggtctgctcttctacatagaattccactgtttcgccttcatctgtcacaaatttgattttatccataatgattctaccgtcctgtttcttcattcttattcgcaagatagtccagatacccctgcagaataaataccgcagcgatttcatccacatgttccttccggttttcccggcgtactcccgtctccatcaatacacggttggcagatacagttgtcagccgctcatcccacatcacaacaggcagacctgttcgtctctccagcgtttctttcagctccagagatttctcagccctgtctcccagtgtattattcatattcttcggtaaaccaagtacgatttcttctacctgatactgtgcaatcagttcttcaattcttgccagcgtctggcgcatcttgttttctgattttctgcggatgatttccacaccctgggcagtaaaaccaagggggtcgcttactgcgactcccactgtctttgagccgtaatcaagtcctagaattctcatcagcgattctcccaggatctgtttttaatatactctttcagaagttcttctaccagttcatcacgttccactttcatgatcatacttctggcacccttgtaactggtgatatacgtaggatctccggacataatataacctacaatttggttaaccggattataacccttctcttccatcgctgtgtataccacatccaggacttctttcacctgtacttccggctctgttttcactttaaaatactgtgtattgcttaaatttgccattttttcacgtcctcgactatacttgatatctattctattctaatacagaagatgcaaaaattcaatcaagtttacagtttttttaaactttccattgctatttatcagttttgtaacattctgccgattactgttattctgccggatcaccgatttgttccacataattttgctattctgcaagaatgagatcctgaccgatgatattttgcagttgtaccataacacgtttattttccagattttcttctgatattaccgcaactttcaggtattccatcgtatgccccgtccagtaggtctgaccctgaatcttctgttgttcttcaaacaaaacttcttttttctttcccaaaaactgctccatatattctctctggcgttcttgtccgagagcgatcaaaactctgcttctttctttttttatctgttccggaagctgatccggcatgactgctgctttcgttccttctctcttcgaatacgggaaaatatgtgtctcataaaaatgaatactgtccacaaaactgcggctttcctcaaattcttcttctgtttctcccggaaatcctgtgatcacatcggtagtcagtgccggtgccggataatattttctcaggatttcacatttttcccggtactcctgcgctgtgtaccgtcgattcattcgcttcagtgtagcagtacatccgctttgcagtgacagatgaaaatgcggacacactttcggcagactgctgatcgcttttgcgaattctttcgtaataatccccggttcgagagatccaaggcgaatcctctcgataccgtctacctcatgcactgcctgaatcagcgtcagcagattctcctgttcttccggacgttcttttccataagaactcagatggatccctgtcagtaccacttcctgacaaccggatgccgcaagtcgtttcacttcccctacaacatcctctgtttttttactgcggatccttccccttgcatacggaatcatacaatacgtacagaactgattgcagccgtcctggactttcaggtatgctcttgtatgttcttcggtacggtcgatctccagtttttcatattcttttgtatgattgatatccacacattccgtggttttctgctggcctgatcgatagttttccagtatggaaatgagttcctgttttttattattcccgattataatatctatagacgcatctgcttctgctttttttgtatccgcctggacataacatccggctgccaccacaatagcatccggattcatctttttggccttatgaagcatctgtctcgatttacggtcagcgatgttggtcacagtacaggtattgatcacatagatgtctgcccccggttcaaagggtacgatttcatatcctgctgcctctaacatctgctgcattgcttctgtctcgtatgcgttcactttgcatcccagattatgcagtgcaacttttcctttcattgtctaccttctttcttttctgccaaattattctttcgttttctttgaatctttgtatgctttcaccttgacttttaccatccaaaacggtaagataaatttagctgaaatgtgctgccaggaactgttattgacagatttacctccggcacggccaaaaaataatctgaattttcgggaggaagttatcatgaaaactgttagtatttcacttaattccattgacaaagtaaaagcatttgtaaacgatatttccaaatatgatttcgattttgatctggtttccggaagatatgtcatcgatgcaaaatccatcatgggtatcttcagtctggatctttccaaaccgatcaatctgaatgttcatgcagaaggaaacaacctggatgaagtattaaaagtacttgctccatatatcattgactgagtctgaatttttaaatcgggagtctgtttgcaacaggctccctttttatatttactgttcgtaactgttcagcacctgtgcagttactagtacatcgttttcgaaataactgtatcattcacgcaggatacagttatttacgaaacggtgtactagtcagaacggaatgatattgtacttctgcgtttcgtcagattttatgcctcaatgtaaatgcgttctgcagtattgactgcctgatccatcatctcatcaatcttctcttccagttttttctctgattttttgatcatctgaatattcggttttgttaccggatgttttgccacaaagatcgtacagcagtcttcgtatggctgtatggatgtctcatacgtattgatcttcagagaaatatccacaatttcctgtttgtcgaatccgatcaccggacggaataccggcatcgtacatacttcattcgttgcagcaagactctgcacggtctggctggccacctggccgatgctctctcctgtgatcagtcccaggcatccctgctcttttccgatgcgttccgcaatcttcatcatataccggcgcataatgatcgtcagctcatcgtgtgggcactgatcatagatatacagctgaatatccgtaaagttaaccacatacaaattgatcggtccgctgtatcttgccaccagttttgccagatccacaactttctgttttgcacgttcgctggtatatggcggtgcatggaaataaacagcgtcaatctttacgccacgttttgcgatcatatatccggctaccggagagtcaataccaccggataacagaagcatcgcttttccgttggtcccgatcggcataccgcccggtcccggaatagactcggagtaaatatagattttttcgcggatctcaacggtgatcagcagctgcggattatggacatccactttcatctccggaaaagcgttcagaatcgctcctccaagatctgcattcagttccatagatgttccaggataggtcttctttgcacggcggacatgcattttgaatgttttatttttatccggatatacatgatccacataagctaccacatctttttccaattgttcgtaaccctgatcttccttaatcacaaccggacagatatacgcgattccaaatacccgttttaatgcttccagagcttcttcataatcaaaatcaccctcagtcagcacatagattctcccctgctctttggttacatgaaaggttccttctaccggtttcaatacatattccatctgacggatcagtgcatcttcaaacagatatctgttctttcctttgatgccgatttccgcatattttactaaaaatgctttaaacatctcttttctccttctgctacttgctgtgattaatgtcttgcatatcgacgcagcatcggtatgacttcatttaacacctgtaacgtgtaatccagttcttcccttgtggttgtctcacagaagctgaaccgaacggttgcttccatctgattcttcggcagtccaatagctgtcagtgtaggacttccacttcttttgtgcgtagagcaggcacttccggcggatacgtagatacctctttcttccagggtatgtaataagacttcgcttctcacgcccacgaaggcagcacttacgatctgcggtgccgcttcttctccctgtggaccgtgtaccacgacctgatccatctttgcaagttctctgacgaaatacgtacgaagcccacgcatatgcttatcattttcttccagatgatcataaaccattttggaagccaatcccagtcctgcaattcccggcacattgtccgtaccggaacgcatgcctttctgctgtccaccaccgtaaatgatcggaacgatcttcattttttcactgatatataagaatccggttcccttcggtccgtgaatcttatgtccgctcgcggaaagcatatcgatatgcatctttttcggaaggatgcggaactttccgtaggcctgaatcgcatccacatgaaaatacgttttcggatttacctgcttgatcagctctccgatctctgcaatcggttccaccgctccgatttcgttatttacaaacattaccgataccagaatcgtctctgggcgaatcgcttctttcagttcttccggagaaatttgtccctgtgcattcacacccagtctcgtcacttcaaatccctggctctccagaaattctgcaggagcagatacggccggatgttcaatactactgatgataatatggttcccctggcgtctgttcgccagagcagttccgattagtgcccagttgttggactcagttccaccggaggtaaaataaatctctttttcttgtacttttaatgtagctgcaatctgtccggcagcttctttcacgtatcgttcactctccacacccttctggtgcatggcagaaggattgccatagtcgtccatcatggttttcacgacgatatccttcacttcttcatagcaacgggtagtggccgaattatctaaatatgcttccacttgttattcctttccttccagtaagaacatcagaatcgagagcactgtcattcctgctgtctctgttcttaaaatccgttttcccagtgtgatcggctgtacctgatgattcatcgccagttcgatctcttccggtgtgaatccaccttccggtccgataaagataccgatagactgccccggttcgatctgttcaaacagctttttcgtgtgtgccatattttcagcaagttcatacggaataaaccggatatctagctcttcggcatagtttactgcctctgaaaacttcataacagaatgaatctctggaatcaccattcgtttggactgtttggcagcactttctgcgatcgtctgccaccgtttctgtttggaagcttcttttttcgcatccagttttactaccgcccgggccgtgctcaccggaatcacttcatagacaccaagttccacagctttctgaatgatcatctccatcttgtcactctttggaagtccctgaaacagataaatctttgacggcaactccatgcccacttcctgcacataactgatatctgcaattacttcttctgcttccatctcgctcaccagacaggtgtattccagattgtcacctgcactgatcaggatcgtctctccctgacgcatccgaagcacatttttaatatggttcacatcactgcctgtgatatgtatctttttttcttccatatcaatctgttcttgttttacaaaaaaacgatacatcttacgcctgctttcttgcggttacggatacccactcaccctgatatgttacttccagaatctccagaccggctgcctttacggcatcaactacgatctgctctttgtcatcaatgataccggaggtaatgtatacagcacccggtttcatctggttgacaatgaccggggtcagcggcaccaggacatctgccagaatatttgccactacgatgtcgtaacattcatagcctactttatcctgtacttctttgtcatcgatgatatttccgatcatcatatcaaagctttctggtgcgattccgtttacttctttattttcttctactgccggcactgcgcatggatccagatcagttccgactgcatgtttcgcccccattttcagtgcaatgatagaaaggataccacttccggttcccacatcgagaagttctgtctccgatgttacatattttttcagctgacgaatacacaactgtgtagtctcatgcataccggttccgaaggcagtgcccggatcgatatgaatgatcattttgtctttgtcttcttcttttacttcttcccaggaaggaataatcaggatatcatccacataaaactgtttgaaatattttttccagttgttgatccagtcaatgtcttccgtctcgtcaactgtgatacttccttctccgatctggcagaacatccgcagagattccagttcttctttcacctgggaaagaatctcttcttcggtcttttcttctccatttaccgtaagggttccgtcttctgtctcttccacaaaaaaactcagataagcgattccatcgtcttccggtccatccggcagaatatccacaaacatctgctccttttccattgcagtcaaaggtactttgtcttcaatctgtgcgccttccagcccgatatcatataatgtactgatgataatatcttctgcatctgtcactgtttttattttaaattttttccatttcataaactttcttacctttctgtacaagtacacaagtgcatagctatgataactatactagattctgttcaaaaaagcaacaaaagagattgtccggaaaacatttctgttttccggacagtcccttttttctgtagctgtggtctttaatcttcaaacgtttctttcaatttatccataaaacgttttttcttttctttttccggcgccggttttccctgacatgctgcatcgaacgcacgaagcgcatcttttgcttcctcggaaagtttggtcggtacctgaacaaccagtgtaacatattgatcaccgcgaacatttttgtttctcagtgacggtacaccttttccacgcagacggatcttggtatcggtctgtgttcccggttttacttcgtattctacttcaccgtctaccgtgctgatgcggatcttgccacccagtgcagcctgtgcataagtgatcggtgccgtggagaagatattcatatcctgtctctggaaaatcggatggcgagccacctgtacttctaccagcaggtctcctctcggtccaccgttagttccgggttctcctttttcacggatacggatactctgtccatcgtcaataccagccggaatagatacctgaatcttctttctgcttgcggtaaatccggttccacggcaatccgggcatttgtctttgatgatcttaccggttccaccacagtccggacaggtctgtacgtttcgcaccataccaaacatggactgctgggtatatgttacctgaccggttccatgacatttgctacaggtttccggagaagtacccggttttgcaccggttccgttacatttggtacaggtatctttcagtgtcagttccagttctttttcgcagccgaaaactgcttcctggaaagtaatatgaacaaccgcacgcaggtttgctccacgcatcggaccgttgttcgctctgcggcttcttccgccaccgaacagatccccgaaaatatcgccgaagatatcgcccatatctgcgccgttaaagtcgaatccaccgaaaccgccaccctgaccggctccaccattttcaaatgctgcatgaccgtactggtcgtatgttcttctcttttccggatcgctcagtacgctgtacgcctctgtcgcctctttgaattttgcttctgcttctttatcccctgggttcatatccggatgatactttttcgccagtttccggtatgcttttttcaaggtcgcatcatcagctccgcgctctacacccagaacctcataataatctcttttctctgccattttctttcaccttatcgaaacgcctcgtacccctgggggatacaactgcggaattatcaaactaaatgatgttggggtcaaaaaatattttgacccttttgataccggattgttccgtacttcgtactctcacaatcctcaaaaacattcgtaatccgctcatttttcttcgaaaaatggctacttactcatgtttttggcgggttccaaggtcagaaatcttcctgcaagcaagcttgcgtcagatttccgaccttttaaccctggtatcatcacattatggggacggtgacccttccggtatccccgtcccctgcatttacttacacgacttgtataatcatctggtaagtatgatttattctttattcgtattaaacttctttgtagtcagcgtctactacgtcgtcgccgtatcctgcttcactggatccctgagaagcaccgcctgctgctccactcatgtccggacctgcaccctgagcacctgctgctccctgtgcctgttcatatacttttgcaaacagtttctgtgcgctttccatcagtttttcttttgcagctttgatctctgcaacctgctcatctgtcatgttatctacaggagcttttgcgatcagatctttcagagctgccagatcagcttctactgctgtcttatcgttggcatccagtttgtcgcctacctcttcgatagctttctctgtctggaataccatagcgtctgcatcgtttcttgtatcgatggcttcttttctcttcttatcctgtgcttcgtactcagcagcttcttttactgctttgtcgatatcggaatcagacatattggaaccagctgtgatagtaatgtgctgttcttttcctgttcccaggtcttttgcagatacatttacgataccgttggcatcaatatcaaaagttacttcaatctgcggaacacctcttcttgctggcgggattccatccagacggaactgaccaagagatttgttatctttcgcaaactgtctctcaccctgtacgacgttaatgtctacggctgtctggttatctgctgctgtggagaagatctggctcttcttggtcgggatggttgtatttctctcgatcagtctggttgcgataccacccattgtctcaatagacagtgacagtggagttacatccagaagcaggatatcgccggcaccggcatcgcctgccagtttaccaccctgtacggaagctcccagagctacgcactcatccgggttcaggctcttgcttggttcatgtcctgtcagctgttttactttatcctgtacagccgggatacgtgtagaaccaccaaccagaagaactttgctcagttcagaagcggtcagtcctgcatctgccagtgctcttcttacaggttctgctgtcagttctaccagatcatgtgtcagttcatcaaattttgcttttgtcaggttcatatcgaagtgtttcggaccttctgctgtagctgtgatgaatggcaggttgatgttggttgttgtagaagaagaaagttcttttttcgctttctctgctgcttctttgattctctgcagagccatcttatcctgagacaggtctacgccttcggttctcttgaactctgccagcatgtaatctgctactttctggtcgaagtcatcaccacccagacggttgttacctgcagtagacagaacttcgataacaccatcaccgatctcgatgatagatacatcaaatgtaccaccacctaagtcgtataccatgatcttctgttcctgttcgttgtccagaccatatgccagagctgctgctgtaggctcgttgatgatacgttttacatccagacctgcaatcttacctgcatctttggtagcctgacgctgcgcatcgttgaagtaagccggaacagtgataactgcttctgttactttttcacccaggtagttttctgcatcggatttcatcttctgcaggatcatagcggaaatctcctgtggagaatattttttgtcatcgatggttactttgtagtcagtacccatatgtcttttaatagaagaaactgttttatctgcgttggttactgcctgacgttttgcaggttcacctaccagtctttctcctgtttttgtaaatgctactacagatggtgttgttcttgctccttctgcatttgtgataacggttggttttccaccttccataacagctacacagctgtttgttgttcctaagtcaataccaatgatttttcccatgactgtttcctcctcatgaattataatcttaatctatattctgataattgttagttggctacttttaccatgctgtggcggactacactgtctttgtacatgtaacccttctggaactcttctactatgatgttctcaccgactgtttcatcttccacatgcatcactgcattatggaaatcaggattgaattcatttcctacggcttcgatggcttttactcccatgccatccagtgcggtaaggaactgcttgtagattttttccattccctgtacgaaaggatcttctttgtcttctgcgacatccagacctctttcaaaattatctactaccggaaggatcttttcgatcacatcttttgctcccacagcatacatacctgctttttctttttcggtacgttttctgaagttttcgaactcggccatctggcgttttacgcgatcggtcagttcttcgattttttcatcttttttatcttttttcttttttccaaaaagttttttctctttggtctcttccacttcttcgcttcctgcctgagtttcaggagttgcttcggtgacttcgtcttcaactgcctcggtttcttttacctcttcggctgtctcctcagcagtcgttttattttcttctgccatctctcacattccacctttctacggctttttgaatatgttgtccaactggactttcaatgttttcagattatctactacattttcataatccattctcttcggtccgataattcctatcgttcctttcattccctctcccagatcatacgatgcggttactacactacaatctttcatggtctgtatcgggctttcatttcctatatatacctgaatccctgtattctctccggaatcagaaacggtatccttgatcatctcaaccagttcctgtttatcctcaaatgcggatatcagttcgctggccttactgctgtctgccagttccggatatttgaaaatgttggtcgctccgcttgtatacaccggaacttcctcatcgtccactgcaatggcatctgccaccgcgtctaatacggtactcaccacaccactgtggacacctgcctgttctttcagcttcgtgatcatgccaagactgatctcttcgatcgtcagaccattcagctgtgtattcaataacaggttcagtttcagaatctgttcatcatcgatcgtctcatccagatttacgatctggttctttaccaggttgccttccacaacgatcactgccagaagctgttcttcgttcagcttagataactggatgaattttactttgttgtgatgataggtaggaccggtaatgagtgtcgcataattcgtattggatgcgagcaccttgaccacctgtttgagcacccgttccatccgatctgttttctcgatcatcatttccttcatctcggaaacttcctgatctttttctttcatcagttcatcgacatataatcgataaccgagatccgatggaatcctgcccgctgaggtgtgaggctgtacaatgtatcccagatcttccagatccgacatctcatttcgaatggtggcagaactcagattcaaatctgtatacttggaaatggttctcgaaccaaccggttcaccagtttccagataggtctggataatcgcttttaaaatcttgcgctttctttcatccaaatcctgcatctatctctgcctccttctttgtcttttcatgtgttagcactcgtttaagtggagtgctaacatctatggtttaaagatagcactgcctcttttatttgtcaatgggtattttaaaaatttttgttttttcttgtagttcttttcttattggtgatttaagcaggaaattttctcctgtagttttctttttcttttgtttttctggcaatcttcatattctcatacaagcaggacttttacatatggtttcaaactttttcgttatcgtgtcagtcggacagtcaccgtattctcctgcaggtatgatttttgcttgttccctgcgtaaaaaataaaaagaaagaattctctgtcgaaaatattcactcacacatttttggatatttgcgcagaaaattctttctttatataaatgtaactgttcagtaccctcacagttacgagtcaaaatgcattccaaatcaccttcggtgatggcattttgccttgtatgtctcgggattttggcaaaaaacatgccaaaacacctcgcgggatactaccttctgaatagttacataaaattcaaaaattttttgagttatcctcttacttgtctagttcctccagatttttcttcagttcgatcatctggtcacgcagctcggctgccatctcgaagttcagatcggctgctgccgctttcatctgtttctgtacttttccaatcagttcctcaagctccttgcggctcatggattccatgtccttttccagcttcttctgtgttttggcaacttctttggatatgctgatcagatcccgtactgcttttttgatcgtcctcggcgtaattccgtgttccttattatatgcttcctgcagctctctccttcgaagcgtctcatcaatggcacgacgcatggaatccgtgatcacatcggcatacatgatgacatgtccctccgcatttctggctgcacgaccgatcgtctgaatcagagaggtttccgatcgtaagaatccctctttatccgcatccagaatcgccaccagtgagatttccggaatatccagtccctcccgaagcagattgatgccgaccagcacatcaaacacatccagacgcatatcacggatgatctccgaccgttccagtgtgtcaatatcagagtgcagatatttgacacggatgcccaaatctttcatgtaatctgtcagttcctccgccattcgtttggtaagcgttgtcacaagaatcttattatgcttttccacttctttattgacttctcctaccagatcgtcaatctgtccctctaccggacgcacttccacataaggatccagaagtccggtcggacggataatctgctctgcccgaagaagttcgtgatccttctcatactgtcccggtgttgccgacacaaaaagcacctgatcgatccgctcttcaaattcttcaaaattcaacggacggttatcttttgccgatggaaggcggaatccatagtccaccagcgtcgattttcttgactggtcgccaaaatacatacctcgtatctgtggcaccgtaatgtgagactcatcaatcataatcagatagtcatccccgaagtaatccatcagggtatacggcggctctcccggcttcagtccggccagatgacgggaatagttctcaataccggaacaaaaaccggtctctttcatcatctccagatcaaagttcgtccgttcactgattctctgtgcctcaagaagcttgtcttcacttttaaaatacgccacctgttcttccatttccttttcaatggccttagatgcctccaggatccgctccattggaacaacataatgagatgccgggtacaaagcaatgtggttcagttctcttcgaatctccccggtcagtacatccacctccgtgatccgatcaatctcatccccgaagaattccacccggatcgccacatccgattcatatgccggaataatctccaccacatctccccgcacccggaaggttccacggtgaaaatccatatcatttcggtcatactgcatatcaatcagactccgcagcacttcatccctgtctttttccatccccggacgcagtgagatcatcatattctgatagtccttcggactaccgattccatagatacaggaaacacttgatacaatgatgacatcttttcgttcggaaagggctgctgtggcagaaagacggagtttatcgatttcttcattgatggcagagtccttggcaatgtaagtgtccgtggatgggacgtaggcttcgggctggtagtaatcgtagtaggagacaaaatattccactgcgttctcagggaacatctccttgaactctccgtacaactgagctgctaacgtcttattatgagcaatgacaagcgtcggcttctgtaattgctgaatcacatttgccatcgtaaaagtctttccagaacccgtaacccctagtaaagtctggcattgattgccttccttgaaccctttcacaagctctgctatcgcctgtggctggtctccggttggcttatatggggcttttaatttgaactcattcatggtaaatccctccatttgtgacttttactatgatcattatcagccaaaaattcgtatccagattcgtaacgaaaagcttattttatggtgaatagatgtctttttcacctcgttacgaataaaagtcacaaaactgatttttgcggataaaacaacactcggaaatacctgatgataccaggctccgattctgtcatatttttactgtttgttcttgtaacagtccctattatatcagacatttttttgaaagtatatagatgaaggtaagaaaaagcacaaatgttcgattcttatttgtacttttctctcttactactattctattttttatcatgctgcgttgaaatattcctccaggattaagtctatttcaatcacttctgaataatcataatactgatctttccgctcttttggaataacttcttcaataaatggttccaatacatccagacagtcttctatgatttcctgcgtatctccatagacatctactgatatgatttccttggcatgtcccaataaatgcgaaacaccttttgaattaaagctattcttcagcaaaatagttgcataggtatttctcaactggtgaaaatgaatatcaggcaaatccaaggatttcaacaagtctttatagtatttctgatgaaagcctttactccttggattcccatatgtagaacaacaaatataattccagtcccggaactcttttggtctgcgtctgcggttcttctcataagttttccgttcttctagaatggcttcaaatacataatccggtattggaagttcacgcacaccagcaggtgtttttgttttaatttcctgctttgtcagcatcttaggtgcacaatcttctgctttactgtttggcttctttcccaactgacgctctactctcaacgtcctgtgaatgtaatcgacatcactgtatttcagaccatttatttcacttcttctgagtcccatcaataccgcaaataaaatctgcatatgaatcggtgtctccttgcttgcctcaatcaaccgaagcacctgcggaaatgtcaatgttttcttctcgtcaattttcaggacacgatactctgtcttttttattttcttcggtaaattgattcccttcgcaggatttgttgccaatacatttttgttaaatgcatactccaatgatgttttcatgatcgtcctgacatttttcgcaaccgattcatacttctctgcaactgcattatataattttctgatatacccctgattcagtgtagacatatacatttttccaagctgtggaacaatataattcttaatggaacttttgtaagttgtataagtatcgtctgttatccggggacgcataatatcttccagccagaagatcataaactcctctacccggatttttccatacacaatataggttccggtatgtagctgtccgattacttcatcacgaaatgcattagcttctcttttggttgtgaatcccgcatgttgctgtgtctttgtactttcatctgcaaacgtcagcaacacgcgaaatccatatccttttttgattgtcgtcaccgaataaaccttatattctacatatttcttaaaatcaaaggtcttatgcatggctatccctccgttcccgttcgttgtggtacaaatgtattatttacaaatgcaataatcttatcctgctcgtccataatctcacaataatattcgtaagtcgtatgaacggaactatgacctaacagaccagatattttaaacaatggaactccaagctcaattaaaatggtcgcaaacatatgtctgagtccatgtacggtgatatttgccaatccatttctgttacagattttcgtaagtgcctgattcattgccgttaatgatcggggttcgccattttcctgacaacatacataatcaaaattcttgtattctatgcccggatcagtttttcgcaattcaatcaactgctgtctgcgttttacttcctgcatcaccacttttggcactctcaatatccggtagctgttctcagtctttggattcctttcaataacagcatattccgtaaccgtaaattctttttctttcagtttcaggtttccaacaagctgtctgctaattctgacggtctgtttttcaaaatcaaaatcctgaaatttcaatccaagaatttctccttttcgtaacccacaaaacagtcccagtaaaatttccagataccaaggattcttgctcgcagcttcaagaaaaactttcaatttttctttgcttaatacccttacctttggttttgctctcggatatggctttgtctcaggcattggattatagcttatgaacttatctcctgctgcatctttcatggcgatgctcaaaagctcccgccctttatttcccgctgaaggacagatttttgcgacacgttccagtagagcatctaaatactctactgaaatgtattttaatttgatatccgcttccatactcggaagaatcagattatataaggtatatgctccaaccattctcgtggttgtctcaattctcggactgaaaatattttcaaaccagtattccagataatccccaagcatcacatctgtcttttgcatttttgcaatctggagatttctctgcttcttctggtatcttttttcatattcccagtaacttttctctgcttcttccggcgtttcaaagccaccttttttcccatattttgtcgtcagatcgtcctgcagctctttggttctgtgataccatgattttccttcaaaaaagacaactctcttttcctttgacattgtctcctgctgcgtttctttctgtttcattctgctctcactctttctctctcctcgtctccattcagccacttatcaaaagaattgcatgggatacgataagatctgccaatcttcaacacccggaatggttttctgtcataataaacattttctataaattcatatgccttggagcgtcccagcccaagcaaattttgaacatcttctactttatatactttcttttccatttcattctctatcattgccatgacgttatcctcctcgtcctaatctttgcgctttactaccggtagtttttagctgtgtaacatctaaaaacggtacaccactaagatatccattttcgtctacatcgtccaatgtgcgaattttcaaatcgcacacttgacttttacgtgttacttgttctttcttcctatataatagtcgtacccattccggacattgcagaacatacataattccttatatcgctgctccggattcacccgccggatataacgtcccggcacctcataaaaattgcctgcacatactctgcacaagctcacgactaacggtttttcaattatcttcggtatcccggtacttcttcggattgctttattgattttctccatttcagtacgatctaaggtacacacataattttccaaccgtcttttatctaaagttctaagctgctccaacagcactacagaatccttttccaaaccttccatttccgggactgcaatgtgtgtcggcagtttcattttttctttacttgtaattgctgccacgatcactgtcggactgtattgatttcctatattattctgaatcaccagcaccggacgataaccgccctgctcacttccaaatacaggatcaaggtcggcgtgataaatatccccacgcctgacgtttctatcttccatctttgctatatctcctctcgtctttctaactgttgttatccctaaatatgtaaaatacaagcctatttgtccccgacgccccgacttgtaattgggaaatcatcagacggctgactgctaatcagctccacaggattttatctaaaataaatatatgggattgggagttttcctctccagggatctcctgaagctgccctcacttgttgcggcatcaaagaaatattttgtatacacgactttatgaccggacaggagtatcattatgcctgttgtctgtcatcgccctgccagaagcaatctgacagttataaccagatatttttcgctcaacagtccgggtaatacaaactgaaaccaaaaggaagtatacgggtgggatttcgctgtctttacccagcctgtgttatggcgtatttgttaatgtggcttacgctcatcacgataacaacaggaatgtgcctgatgaatgtatatgaatttgtcaaggttcttcccgctccccagtcttttcgtgacaaaagaagaaacaggtggatcaaaatatttctctttccacctgtttcctcacttaaacgctatttttcaacccactatctcaaaatctttttcaaatttctgattgctgcttttacagactttgctaccatctgaaaagagcagccttcttcctgtgcaatctgctcataattcttatcttcaaaataatacttcatcaatcgtcttctctgaatttccgacaactgctgaattgcactatgtaaacgttccgcttccagtttattcagaacagtatcctctacaccttcctctttctgaaatacccgttcatataaactggaatcccagatttctgactgttccaaatgcctgtccacaacattcatatgcgacacatcctgcaattcaaacgtattaaaagcttcatatacattctttcctatttccaaatccttgtactctttttcaccattacgaaatgaaacataatattttccgtccttctcatagatttcatatgggttatatttatcttttcttcttttaggctgtctgccttccatgacctttcctccaatctgaatttttttgaattcagatcagtaggcggggcacgaatacgaacaatcgaccttattttgaattgctcattctcaatatttaggtaacaaaaaacgccctgacagatttcactcctatggacgcatttaattcgatattttattaccctggattcattattggctcttaccctagtttcaattccaacatttactaatgaaattgttgagatttttttaattgaataccttctgttgaacagaattttttagctgaactcttgctaagaaccatattttctccggttagattccggaaaagaaaataagcatacaaatactgctctttcggaatctgttttttttaaccgaaagagatttgtatgctttctcattcatcgggtaataccctgtgttttttctaatgttacacccttttcacttttcaaatttagggtaatacactaagtttatggaggtatacaaacatggatattccaaaaacattatttgccactttagtaaaacaagggcgtatggaaatgcatttaacacaagaagctcttgctgaaaaactcggaatatcggcggcttatcttggagacctcgaacgccataaaggcggtcccagtctggaattattttgtaaaaccatgcagactttaaatatttctgctgatgactacgtttatccaaatcagaataaaaataattctacatatgatcagattcttcggctcttaaatcagtgcaatgattatcagttacaggtaattcttgcaactacgacagctctgctagattctaatccttttatttctaacgtagacactactaatgatacaaaataaaacttgtaaaataccgataaatagctgataattaccgatatttaaaattagtggaataaatactattaccatatgttaaaaacagttatgctatatcattacaacttgatataacataactgtttcttctttacgaacatcctattatctatcaaatactacatttccctccacgacacacttaattgcttttcatctcgctaattattttttccatatccgtcgattttttcaagagtcctaaaccagccaataactgaatacaatctacatatccttgacaatatgccctttgttctgacacaaacgcttcttcttccaaaatttctccatattgcttcaacttctccctgtcctcataacttatatgatcgagaagtttattcaccttttctttttccattttcttcttcaactgaatatttgcaagttcttggaaatagatataactttctctgtttatattctcacaacgcaactggttcaaaaaagaggatatttcattccaaatatcattttccataaaaatttctcctgctttttttggtatctttacttattatgcccaattttatatttcatcatttcatcaattcaccattaaatttatatcccataccccatacatttaaaatgtatcttggttttgcagaatctggctcaatcttttttctgattctccgaattatgcccataacattatcttctgccccataatatggttctttccacacctgtgtatatatttgttcctttgaaaatatccgtcctggattttttgccagcaaatataatatttcaaattcataattcgtcaattgaaccagctcaccattactttctacagaacgatattccgcatttatttttaatgctccgtaatcaagtaccctattttgtttaccaggcatctcagagtattttttagcagacagaaaatgtaataattcatttaatttttcttcctcattttcatcaaatgttacaacaactacccttcccattttataaaaacctttcatattccaaatcttacaagtgtaatttttatctattattacatctgtaagatttaaagtcaagtttttatttcgttgacagaataaccttttaagatatataatatttttattacatttgtaagatttggaggaatatcacatgagcaatctgcctcaaatttcagaaactgaatttgaagttatgaaaatcgtttggaaatacgcaccaatcagcaccaatgaaatcactgaaaaattaacacaaatttcccgttggagtcctaaaacaattcagacattgattaaacgtctcgtttctaaaaaagcactaacctatgaaaaacaaagccgggtttttgtctatactccattggtcaaggaagacgaatatattcggcagaaaagtaattcttttttaaagcgatattataatggtaatatcacttctatgcttgcctcttacattgaggatgataaattgtctgaagaagacattgctagcttacggaatcttctttccaatcattaaccatgggaggagcatatttttgatatattttagttttcgatttttactctgtaatgccatcatttgtatttttttaggtagtttactgggattaaaaaatttattgcaaaggcaattatccgcacgtatgcaatataatctttcgattatatttcttgccgttctaattgttccctttttaccaataagctctgccccatcttctatatcgtggagccatttgctgacagccagttcaagtaccaatggtgacattcaaaccacttttctttctggtaatggttataatttggataaaataaatgattttgctgtctctgtcagcacccaaataccaacttttattcacacattacttgtatttttctggagtatcggtatattcataatgttttttcttctctaccgctcagtaagacaagtaaacgccttacatagttctgctttacctcttcaaaatgaagaactaaacgctctttatatagaatgtttaaacgaagtgaacagcaagcataccattccgatttatagtacagcatttttgaaatctcctgttttggctggtttcctgcatcctcgcatttatcttccaattcacttgatttcagattttaacgctggaactataagcgcaactgatattcgctatatgcttcttcatgaactgcagcactacaagcataaagatattctaattggatatttgataaatacagtacatgttttctactggttcaatcccctaatctggtattttctaaaaagaatacggcaggaacgcgaacttgcctgcgacagtgctgtattacaattattgaaagaaacagaatacaagtcatatggaaatacactgattaactttgccgaaacaatagctctgtctccattccctcttactatgggaatcagtggaaatataaaacagttaaaaggacgcattttaaatattgcatcattccaccaacctacttttaaacaaaaaattcgtggatatcttatatgcatattcgtctctactatcatcattggatgcattcccatactttctgtttatgcttctgatcagactggctatcattttgacacaaccgaaaagaatattactcagctaaatctttcttccaattttggggactacaccggaagttttgttttatataatcagtctgctgataaatggaatatttataatatggatcatgcttccacacgtgtatcaccgaattcgacttataaaatatatgatgcattacttggcttggaatctggaattattacaccagaacattccactttcacatggaatggagaaccatatccttttaattcatgggaagccgatcaagatttaacctcggctatacataattctgtaaactggtattttcaggcaattgattcacaggcaggttttgaagccgtaagaacatttttacagacaataaactatgggaatcaaaatactggaacaaatctaaatctctattggacagatttctctctgaagatatcacccatagaacaggtggaattgttacaggatttctatcaaaataattttcattttgacagtaaaaatatccaggcagtaaaaaaagccctgctgctttccactacttcttccggttctctttacgggaaaacaggaaccgggcgtgtcaatggtaaagatgtcaatggctggtttatcggatacattgaaacagcgaataatacttactacttcgcaacaaatattcaatcctcttctggtgcaactggaagtcaggctaccgaaataacagaatctgtactttctaatcttggtatttggaaataaataaagagaactgatagcataatttcctgttatcagttctctttatttcattcttctctactgatcaattctgcaaattacctaaccggtactgatacctcggtatattatcaataccattatctaaaatcctgtttccaacatactgaatcgttccatcatcctgaattttcatcgtaagttcgtgtgtaataacagcatcattacatacaacagaatcacatactgcatgaattgtcaaaacaatggttccatcttcattatgcctgacttctgttacttccggtaaagacaagccaaaatgtgttggtgaataattaccacatcccaatcgttcccagataaacatattactttgttcatcgtagaccgcccattctttcaattcttcttttgtaacaggaagatatgtcataattacattttcgaactcttctgctggaattcccacaacctctttttctgccgtaaatttttctccacatttcatttgataaaaatattcataaagtccattataatccaacccctgcatatcctccgcattccagtttgaacataacagattgtttccctgatagccgaacgtactcacatatttttttgaatattcccgacactcctcactcaaaggctttacccggataatacaacttccatctacaatctctgtcacttccggtggttcaggtacgcataattcataacagaaattcccattttcagtatatgcccattcttttatttttgatagcgatatgtatgtaagtacaggctctgtatcctcactccagatcatttttgcggacatcacactcatttcttttccatcataactatattcttttctggtaattccaccatctgtatctgcttcatataaaattacacttcctttttcttcttgttctgcagattttaaaaattgttccatcttctgataattatccataacagaataatgatcggaaccaatgaccggattcccattttgtttgataatttctttcatccgattcatcatttgctcagcagtgttctgatctgcttcttgtattccattatattcagaataaatatctcggataatgcccataatttcttcacaatcgttcacagcttcctttttcttgtcttcatcgattggtagattatatcccttatccggattttccatggtagtgtttttctgattcttctcattttttacatctgtgctgtttaacgatatcttactttcacaggaagtcagaatcattcctatacaaagtactaacaaaatactttttcttttcatattgccccctaattattactgtaattctcttcccactcttcttctgttaaccttggcatataccaccctgcatttgcattttgatctgacttgattaccttatttgataaatactggaaacttccgtcttccataggttttatcatcaattcactggtgattgcctgatctaacattctgatttcccatactgcttctatcgtaagttttaatgttccatcttgtaatttttcatatgagataacttccggatatggctcatatgggaattcacaatcatataaccctcgcggtctgtatctaaaagttctattatcagagttataaaaagttcctttttcaatctcgctattactaaatggtaaataggtctttataacctcttcaaactcatcttttggaacttcatattctgctccaccataatttgcttcatatggaacttgctttccatatttcatataatacattttttcataaagatcataaaaatcaagttccgtataattctggttatcccaatttgtaatcaacagattattaagtgcataccccaacggcataacatattttcgattcaattcccggcatgttttatctaatggctgcactctgaatccagtttcacccggtgctccatcaaatcccggtgggtgatattcctccagaaacaagtatcctttttctgtatatttccactcatatgcttcatattcatcataataattagcctgtggactattatccttccatttaacctgacataatcgaacatttatctttccattcattgactctaaataatattgtataatttccccttcatcaaatacaacaacaatatcaactgctgcctgttcttctttctccgctgctttgcaaaattcttctactttttcacgattgaccatatcaatctgattatcacaatctactgccgcatatcctttctcttccagacaattgataatttttcttttcgcctttaatgtatttaactccgacttctccttcatataaacagaccgaaaagtttgcgctgctttttttgcttctgcattcatttcagattctacggtttctttcttttcttctttttccgtaattcgattttgtccgcaccctgtaaaaacaataagaactatcaatatcatcgcaaatatcttacatatgtaataattccccataaaaatttttttatccttcaaaatactcatccaatactgttgcatcttttttaacaacataaccacttccaccgattcctttcttctaatttttttgttccttaaatcttacacttgtaatatttaaaaaccaagtctattttcaggaattgtatactccagattcaccatctttatgtgcgatatatcctattttattaccatcctctatatcttctccatttttgttaccctgtcattttaaagaacatccttacttacactgttacatatttttccgcttcttctttgcacttcaacgtatttccatgcccaattacatattccatacattcttttccctgctcttcttttccgattcggtagtaacatactcccagcaggaatctgcgtgtaacctcataataaggcagcttttccgtatcattttccagtaatcttactgctgcctcatcttcacctttcagcatcaaattttttgccataaacagtggattcttttgaaatactttccctgctttttctaatgtagccgaataacctgccgcatctttctcctgatatttcttcgacagttcgagattcgtcatgacctgctgccaggaacgtccctctctttttccttcccattcattctttatatactcttctgccttctgcaactgcccatttatgatcagtgcaactacatatttagactcagctatcagcatgacacttttttgaaatccatgataatccaagctctttccgtactttaccaactcttccagcatttctgaatatttttctgcatcacattgctgtgacagaatccggtcaatttttgaaaaatctctgagaatgtccctgattaaaatgaatatacctgcaatcagatcaaccaccacgcaaatccacagaagccagggatctgtcgtgacccagcccggctgcttcacatcgaaaaagagtactgtctcctgatgcgggaacggatttcctttgaaaatactcaccacacaaatcaatgctgcataaatcaacagcacattccgtatcatcctgatgcgtccatttttctgcttttcataaatcttttttatctgctcttccattttctctacctcgctgtcacactatttttgtacctacaacataattatacataaattaatattgtagcgaatctctgttcggttgtacaatatctactgctgcctgttcttctttctccgctgttttgcaaaaatcttccactttttcacgattgaccatatcaatctgattatcacaatctactgccgcatatcctttctcttccagacaattgataatttttcttttcgcctttaatgtatttaactccgacttctccttcatataaacagaccgaaaagtttgcgcttctttttttgcttctgcattcatttcagattctacggtttctttcttttcttctttttccgtaattcgattttgtccgcaccctgtaaaaacaataagaactatcaatatcatcgcaattttcttacatatgtaataattccccgtaaaaatttttttattcttcaaaatattcctccaatacggttgcatcctttttaacaacataaccacttccaccgattcctttcacattctcaaccatactgataagaagaattggtttgtccacgcttttatctgccgtaaacaccgaaaaccacccgatttctttgccagaagtatcttctttcgttgccttcaactcggctgtccctgtttttccagccagcaaaatatcgtcacgatgtgcagcatatccggttccttccggatcatttacaacaccttccaccccttgcataatttcttctacattttctttgctaaacgtattttctatccatgtttcaccagatgcttcttctttgtatttcaaatatggttttatcatattcccttcatttaaaaatgaagtataaatacttgccagatgtaatggatttacaagaatctgcccttgcccataaccactatctgccaattgtatttctgtttctattttatctgtattggaatatgttgattcctgcatcgcaatctcaaacggcatatcctgattaaatcctatttcatttaaagtattcataaaattctcactacctattttaagagctgcctttgcaaaataaatattatcagaatagataattgcatttttcataataaccggttcatattcatgaagtgttgtcacttgataagatccccaagacgaatctttctgccatgccaaaccttcatttccaaaatcttcttttggatctatgcttcccgttttcaacccaattcctgccacaactggtttaaatgttgagccaggacaccatacttgacgaaaacgattatataatggcttcttttcgtcttcgtttaatgatgtccatttctctgatgataagccccgtataaattcattattatcataagatggggtacttaccaaagccaatacttctcccgtataaggattcattgcgacagaacaccccggatcttctttaaactgctcgtataatgatttttgcaaatcggaatctatcgttaatcttatatccataccatcttctttaaaaatacttgcaagaacctcttttacttccccatcactatccaaaatctttatatcacaaccatcttttccttttaattgcttttcgtataacttttccaccccagatcttccgattacactttcagctgaatatccttcccctggatgattttccaaatcttctgctgttacagactgtacataaccaattaaatgagctgctgcttcccctaactcataggttctaacttccacatctgatagcataacccctggaatttccaaaagtttattctgacaatcctgctcttcaagtgtcttttcttctggctgtattttcattaaatctatttcttctactttcggaatagtttcaattggtacaaaagaatcttcttttacccactttgctgtgagtttgttatttattgtttctacatctatctctaataactccgctattttttcaatagatacattcctgtcttccagctttcccggtataatgccaactgatgttgctactccttttcctgcaagcattttaccatctcggtctaatatttctcctctctccgcttttgatgtagtaacacttattttatcatcactctctaaatctggaaaaatcaggctatcctgccatactaatttatatccctgtttcgtcttcttcagttccgccatattgtcaaattgtattgttccggcaattgtattacatgatgtttcatacgaaagcgtaactgtatctgcttttttctctttcacagctatatgactgattttaatgtcactgacctctattccttcgtatatcttagaatttctttgtatgtattcttcttttgtcagatatactttttcatctgaatctatcatagtatacattacttcatattcctttttttcaatatggttcatatattccataagtgtatcttctggtgattccgttatagtcctttttaataaaatacctcctgaaacagcaattactgttatagctactatcagcccaaagatcttacaaatgtaagatttttggatattttgcttttttcgtcttcttttcatagatattcctttcttctaatttttttgtttcttaaatcttacacttgtaatatttaaaagtcaagtctatttcaggaattgtatactccagattcaccattagactatcacactttttctgttgccttctatagtattgacggttccaccgctgacactctctacaattccaacgtggtcaatcgttccattgtctccccagtcaaagaaaataatatctcctgccaccggggtataacttccgtcccggaacctgcccttactttcaaaccatctgacaccgtccgaacaacgggaaaatttcggaatgactccaccacatccatttcccatttgatattttcaaactatcgtgtgttctggtagtgtaggtgttaccggaaaagtgaactaattcgtatggttcataattttccaggtatgtgagcaagtccatccgcttgaccttctgcacgaccgatggtggtatatatggcataattttcatctcctttcctgccttggattgatattattcgggataatacccaggcatgaaaatagccagatgattccttgagttggaaccatctggctatgtaatattttgtttataagaatttattcaaattcaatgttacgaatttcaacaaattcattggaattttttgtaagttccatccactcaagtacattattattcctctctccctttttataatactcactgacaatcacacaaatttcccttctacaattcaacttatgtcgagcttctttctcaaaatcttcaaccccaattgtagtatccttcattaatcttggtaaatttataaataacagcttagtttccctttctacaataatgttattcactacaagcgcatataataaccgtaacactggcattacattactgatttcggtattaattattctatatatagccatttgataaaccatatttgaaaaagtaccaaatcttttcatttgttttatgtcaagatttattctgcttgtttctaagtagaaaatctgtaataaattaatatcttcttcagaatggagccatagtttttcttccatatttgtatatatatcttccgaaatatttaatttttcaagctatagtttctctataaattctagaacatttgaagcattataatactcttgtaatgtcttaaaatattcttctatcacctctttttcttctatagaaattatttctttcttctttatttttaaaagtaataatcctactgcaattctataactttgtttgctacgttcttctatttgaaacgcagtttgttgatcattcttccgatctatattggttttaatcaacttagtcattactgaaaaaatcttcttataatctatcgcatctgattgaacatctggaagtatatcaattagctctctatacgatccggtatggctagaaaaatattgtttattgctatcttgctccattaattgtaatgtacttttcaaaatcaggtcatcatttaatttataccgttctttatttaaatgatataaaatattttgatgttcacaagtctgttttttctctaagcattgatacaaatattcttcatcattctgcttcaaataaattaattgtgctaaaataatcaaccgttgcaatgcatccgctttttcttgcgccgtcccaatctccatcaactgtcgaatttgaattataatattattatacaaatcatcattaattttgtatttttcttttggccgttttaaataatttactggatcataatatgttcgtctctcattcgtcttcattggaaatctcaaaatcttttcgatacgttcaccctgttctttttctgtatacgcattgcataccccttccaaaattttatttattcctttaaaattatcacgcacattactgctgcagagaattaacatataatctaaaatctgatccaatatttcaattgaacatttgtaacataatcttgatataatttgtggaagaatttttgctgaattatcatataccgatgtagaccaattagcattttcaggttttatatttttactcactaaatcaagtgcttttatatactcttgtatacaattatcaacctcctcttgtgtcattccggaaagcttatttcttccaaataacatatctaattctttttcattctgtgcaatcaatatctgtattaaacaccactgtggataatataaatataatgtttctattaccctttgaaagcctttcgtattcgttaccatttgtattctaaatggatgccctgtttgctctaaaaatctcaaataatctaaagcataataaattttactattacatctacccatatgagatgtataggttatactcaaatcataatttgtctgaactgatgtctcaggttttttgtcttccttttcatttaaatgagaacaatattcttcattttctccccaccagtttacgtccccagtttgaatacaagcttccatctccgcatctaaatttacctgccagtcaccttgccgcatgaaattgagcaatgaaacaatacactcttcaatcgagcacaaatattcatctttgctatttttcactagttgttgccggattttaggaagaatttcaccaagaatttgttctcctttaactttttcaccagctattgcatacatactacttttaattattggccaatacaaatctccctgtgctaaatcccatttatttaataaatctatcaaatttacatctttaaaccgatacatcttcatccaccaatcatttgaatacagaaattgtttttcctcgtattttaatgttgattccaaaatcttcgctctacataaatcatattttcccaatcagccaattcacgatatgctctcagcaattgtaaatatatatattgtattttatattctgttttttcttctttttctttactgttctccaatatatcccaaaatttttctgctgtttctaatataatcggacgtcccacaatatttaaaaattttacatactcatacatatattctatctgcatactaaatgaaatatccacaagtttttctttttttgcgaaaaagtcccattcatcatccaattcttccaaaacacgatttaccttatatttcattttccatggtaaaaaaatccagccagggtaagagttatttaaaacttttaatttttttgttttttcttcaaaactattttctgctgatatcgctatttcacttaaatcaaaccactgatcttttttgtccttctcttcaatcaattttcttaaattctcaaagaaactcttaagtctttccggaatttctttttctggatataattcctgtaaatccaccacaattatatttttatcaaataacaatttttgtttcgcttcagatatatgttctatagaaatcatatatattttctgagaactgctttttcccaaattatcatgaatccagccaatccagctaagaaaattgggatcttcacaggaaaaccctatcatgcaaaacacattttccaacaaagcctgttgaacagtatttaccattgctgcaaattttattggataagttctataatcttcttctgtaattatgaatggccgttgagacggaaatgatccatgaagttttaaaattctaggtgcatcattactgttaaccaaatcctcttgattcaccactacattatatcttctcttagaaactttatcggcagctcgctctaaaagagtgtcataatttgttgtaaatacgtccctccatggcaattccattaattttgtatacacttctgaagggccataatcttcatctggaacagcctcttttaaaatattttccaatttaggacgtcctactgtaatttcaacctcttgtgctaatcgaagtgaactattatattcttttccaggtccagcattcccatataccgtttcataaaacatatcagacaattcattccagtttttaaaccatttatctgttgaagaaattttatctgcgtttttagaaaatccagctccaatcatcacggccgcatgattggctgacatcgcttccgctatttcttttatgtaatccacaagtctctacctccattaatttcaacatgtatatttattcctatacaattaattcgcaatccttcaatatcttctcgatagcctcccatgccgtcaatgaaggattctctttataatactgataccctttatattgatacaacgtatatccattgtcttgatttctctgcatgatttttcttgcccgatcaacagccgcaattacattggacaagtccattttcttaagacatctcttgaaattattctcttctttgaattcgtccatattttgaaatttttctccaaacgcccggttaatcggtgtaatatactgttttcgatgtgaaaatgacgcattacagttcgtcatatgaagaatgatccataaatcaaaagtaaaattactatatccagatttatattttatctgttttcctattttttctgccttcttcatattgtccagagcttcttgaaagcctttgacatgaagcgattcatcactttcgtaatcaaaaaaatgatagatttcaatctttctggtaacggtcaatgatttcgcatgctttaatggattttttcttaccggacaatcaatagacaccttgcatgcagctttttcagtattatttatcgtatcctgcagccattttaagtaccactgttctgtttctccctcaacactgaaataatatttatttgttggttttctctttgccatccctatccctctttttcatcacataagatttcttcaaagattggtgtaaaatcaatatcctttattgctccatactggctgatgaaatatttgctcatataatcttcgtgcttacgaacacccttatcacctgttgtgccaaaatcagataatgcgtataatacactgtcatgggtatcatcgtcacgctcaacaaacttaatctcgtctcttctgaaaagatttgaattcaaaaatatcggattatgagtattaaatataagctgtgcatgatggatatttacatcatcattatgaaatacattgataatactcatcaatgccatcggatgaatggatgcatcaaattcatccaccaccaatgttccacccgtttgcatcgctttaattacaagcggaaacatattgataaatcgaatcgttccatatgactcaaaaatatctgctgcaaccgccgtagtctttttgtttttcatatttttaaatacagaatataattttgcatcaggctcgtcatcgctcacgacatatcctactgcatttgaattaattccaaataattttgcagcttcatctgttgttttttcaacatagattgctttcttttttggatctgcaaatcttttaatcagttgcatcgaatccgcacgataaatcaccataaacttattcgtaaaccaatcaacaatcagctttgtgaatttaggcgaaaaaatcaacttaaaaccatttgttaaaaataattcttcttgattcaaactgtttttcgcaatttcatttacactgtctgcgttctgttctgttatatccgacaaataatctttaataacctttaagttctctattttcagatcttgcgtacgttcaaatactctttctccattgacctccagcacttctgcaaggatttttctttgatgttcctcctcaagaaaggttccaagatcaacctctaattcatagtgtattttaaatttatgatcttctccatcttcctcataaaattctatttcaaaacataccggttttgattccatttcattattatttggaatcaattctaatgctgctgcagctgggtttggtgatgatttttcttcagaatttctgatatttcctctcaagacaattgcccgcaatacatccatcgcaccaataatattagtttttcctgccgcattcggtccataaataaccgaagaacttaacccttttatctcttttccttttatttttgtcttcataagactataatctaatcccttttgttttggcgcagctaccattgaaaagcttgcctcttctacaaaagatttataattttttgttttaaattcaagaagcattttattacctccattctgcttgtttttaacaaaatcatatttatattatagtcttattgtatgatagagtcaattttttattcttattttgcgctttttcttcaaaatcattttatttttgttaagtcaaggaatctttatatcatagattccctgactctccaccgcttgccctatctttcccaatccatccttcctgtcacattcaacatcttttcttctcggaaactaagcatctttccattagttccgccgacaatgatatgatccagcaattctatccccaatagttgtccacacttctgcagttttcccgtaacgattatatcctcttttgatcaatgaacggttcaagtgcttcaagacaatcctcgataatttcttgcttatctccatacacatcaatcgtaatgatttccttagcatgtcccatcatcttcgatactgcttttggattaaagtcattcttcaataaaatggtacagtatgtagctctcagatcatgccaacgaatgtctggcaaatcattttcctgtaacagttgtttaaaatacttccaatgaaaatccttacttcgtggctttccataagtagaacaacatatataattctcatcaaaaaaacggattgttcttgtcattgattcttctcttacgattcttctcgtatttctgcctttcttctaaaatcgcttcaaacagaatatctggaattggaatcactctgttactggattctgtcttcacatcaatctcctgctttgtataggtcttaggcttatagtcctctttcttgctcataggcactttccccaactgacgctccacatgcagtgttctgttgatgtaatctatatcagaatattttactccgattatctcgcttcgacgtaatcccataagtacggcaaacattacctgcaaataaatcggagtttttttcgcagcttctataagaacctctacctgcttctgattcaatgtcttttgctcatctatatggcgagttctaaactcagttttctttttttgctttggcaaatcactcccttctgccggattgacagaaatcatcttcttgtccagagcatataccattgacgtattcattattgtctttaccaatttcgcaacagattccgatattttaaattccttattataaaactgttgcacattacctctacttagctttatcagtttcgtattccccaaatgcggattgatgtgtttcacaatcgcatttcgataagcaacgtaagatggatctgtcatttcaggacgcataatatcttccaaccaaaattccagaaaatcctccattgctacgttatcatagacaacgtagatattggaatataattgacctataacctctgtacgagcttgttccgctgtcttttttgatgtaaaaccacctttctgctgtgtaacatcactgccgtcctgaaaaataagttttactctaaaaccatatttatttttaatagtggtagtaccattttaatctttccactctgaacataagaacacaagtgtcctaatgtaccatcatctctcaagtcatacccagtggaatcaaaaatattagtatctattgttacatataatggatatcttatcacccgtattatgcgtattaaatctattaggaagttcttacaactccaaactattttcctttaataaaaagtcatagatactcatcgtagtaattccatcttcatcccttgtaacatttacaacatctttcacaacgataatttttttaaaagaatcatttacatttacaagagaagctttttcctgaatacgcttttcttctgtcggcatactgaaagcggactggatataataacgtttactgccaagattagctacaaaatcaatttccaactgattcttgtactctttaccattttcatcagttccacgcttttctacaacaccaatatctactgtgtatcccctgcttcgtaattcgttgtaaataatattctccatcagatgtgtttcttcaacctgtctaaatcctaatctcgcatttctaagtcccacatcttcaaaataatatttcaacggtgtaccaatgtattttctgccttttacattataacgattggctttattgataataaatgcatcttccaaatattcaatatactgtctgattgtatttaggctaattgttgactgaatcgcacttttaaaggtagcttcaattttcggtggatttgtcaacgaaccaatgacagaggctaagatattaaccaaatcttctagctcctgcgttttttcaatatggtgtctttcaataatatccttcagataagtctctttaaaaagatttgtcagatagctaattttctgttcttccgttttcattgttacagtaagcggaagaccaccatacacaacatactctgcccatccacggtacatatcaccatcataggcttccataaactctttgaacgttaatggataaatatgaatttcgtcacctctgcctctaaactctgtaatcacatccttagataagaatttagagttacttcctgtcacatatatatccgcatttctgatatgaagcagagaatttaaaacttcttcaaactcctgtaacatctgcacttcatcaagcatgatgtaatactgctcatcatcttctatcaaagactcgatgtaatctaatattgtatccgggtcacgatactttttgtttttacgttgatctagttcaatcgtaataatatgcgaagcagtcacaccatgctccagcaaataatttttgaaaatattaaataacagataagactttccacatcttctgataccagttacaacttttatcattccattgtgcatacgattaatcaaatcattcaagtatttatctctcttgatatccataagtcactctcctttattgcacattttatacgattccgtaaaaaatattcaatcaaataaattttcactttatctagttaaattatcattgaatattttttacatttgcgtcttgtttgttcaacgatattatatttctttacaatgcaaaacgcaaatcttattgaatattttggacagtttcgtaaaaaatattcaatataaatagtcctatatgtaaaagaggcagctttcgccacctctcaaaccttatttcttattctgctttttcttttcgactatagcatttaccttttttacgtaggctgtctctttactttattcatagtcttatcctccaatcttataaactaacatcttcacgccgaggtgttttcttagttccggcaaaagtcttggattcttctttttctattctcctgtcctcgtatttggaagccttttcaaacaccttatctgttacatcgtaatgatacacctgatccgtaagcttgtcttgtgtgtcaacctgcgttgcatttatctctgtaaccatagcaagcaatgatttatattccatatttccatcaggaatcacataacgaacagcagtatctacctcttccattgtgtatccggcagcccctgcaatcagaacattcttaaaagttgctacaccattttcgtccgtagtcgcatattcgctgacttctataccagaagcacttgtaccatataaatgaaacttcatgccagaattaaaaccataatgctgtctttttatctcctaacgtatccagttccaactcatcataagcagtataaaaagatttacagccacaaagcagatcatatatctgcaaaatcccaatctccatcctgacaggagcataaatccaagcatgttgatggcagcgtggtcgaagatgcaagatagcaggctgccgccgcgataaaagatcgttaccagcagaaagtcgactgcgattgcagaacgcagtaaatcacgatccacacaagtgcaaaagtcagttcatttttctcatatgactttttcatagtatgtttctccataattcttttaatgtgtacatctctgtcggaaactgatggcgaatgttttcctgtaccgaaaattctacatctattcctgcttgctttgtcacagtatatagtcgctttgccatgggcatacaatcttcatcatctgatccacaaaagattcgtatttttatattcttttcccttagtgtttgaaccaaatcatgtccatattcttgtagaactggaatccacggactttgcaaaatcaacatatcgcaaacggctggtgaaaagcaaacggaacgcaacagcatatcacatcctgccgaaaatcctccacatacaattttttgataatctatattatgtattttttcgattgcatttgctaccggaatataggaaaccatatcataactccaacgatatgttccgtatccatccggttcagcactttgtatggtttccatctgccacagcttatcatcttccatgatcggcagccaatccttacgtgcgatttcactgttttgtgtatttccatgaacagccaaaaacagattatcagcacatttttgtttccatgagaacaatgactttgttttagcaacagcagctgtataccggtcattagaaattgattttagtgaaatgaactcagaattattttccaatagttccagatcatcatcttccaatatctctgtgcgataccaccagcccttatccataatcgcgtatttcagccactttaatgctttttcaggcatacctgccccgcctgccagacaggacaggaaatacagtgtttgcggtccatagttttcaggagcctttttataggcatccaataaaaataaatatgcattatcatatccgctctccgcaatgtctaatgttttctctaaaatatcattttcttttttcaattctgttccctcttttcaaaaagacgcagaacgaactcgatctaacatcaagttcagctctgtgtcttagcgtctgactgtttcaaaagtgttatatgaaattgtcgtaaatcaatgagtgtttcctgcttgcactttggacagaaaagaagataattccgaagaacagtatcttctcgcagccacacacgggttttcccgtgacaatatgggcatagcagccattgccctttcttttccataatcatcacctactcattcgatggggcagagatgagcgtaatctgtcgcattttgctgccttccactgcctcttttttcatgtacttgaccgcaatctgattgagttccgtaagaaaacctgaaaactcctcgtcagtcagtagcagcgtgcagtttgtaaatagcaacatatccttcttgggatcagcctttccactggaaaaatacttcgcaaatgttgcacagatactgagcagtgacatttgtaccgcatttccggtttcatcttctgtctccatagcatccttatttaattgataaacgcttttaacagtaccacgaattcgattttcacccacaaccataagaattgtactatctgtaagaatcttttttatgtgccgatacaggcttgcactgggaacatcgggcagcgcttttctgatttccttgaccgtgccggttttgtgaagcaaaaaatattgaaaaattctttgtcggacagggttcatcacaatttcagccatttccatccttttatcttcactccttaaattattctttaattaaattatattctcacttttaagaatgccaagattattttcataatatttctaagatttcctttttcttcacaatcggttatatataagattttctcttttataactagagcgtggaagtttctgacagtattccggggacttcatgcggattgcttcatagaaaaattgtgagctttttggtaccctttatatttcagtgctcttattcctttccgtttaatatctccaccagtcttttttctttgataatagcaattccctgactttcatcgcccaatatgatcagattatcacctggctgaatatcaaatatttttcttgcttttgccggtatcacaatctgacctttctctcccactttcgtgattccaaaaacatgctttccctttggcggaacaccaagacctagattattgctgttttctctgtcataatttacaagatcatccagacttacatccaatacttctgccagaagtttgcccttctcaatatccggtagggattctcctgtttcgtattttgaaagtgtctgtctacttacaccaatcttttcagccagttcatcctgcgaaaagccatgcattttacgtgcggatacaaggttgtctttaaacatgttttccttcctttttcagacccaatacacaccagcggataatcggtatcctgctgatgatttcgtataaaagcaatgcacctgcaaatgcactgattcccacgactatatatacaatccctgccggaagttctgaagcaaaacacctcagataataagctacacaagctaatggaagataatgaaaaacataaattccccaggatttttttgacatccatcttgatactttgttttccaagtttccatattttttcataaatgccaaaattgcaagaattgaaaaccaacaataaatacaggcaggcatattattaagtacaggctctaccgcatagttttcaccataataatatatcgtgtagaatattcctgttgcaccggctgcgatcagaaaaatcgcccaccatttacttaagcactcaacaacctcatcatgtgaaaaaatgaaataacctgtaaaaaaacagaacccgtaaattccaaaccggtacacagttactatcggcgtattaagaacttgtgcgaatccatatacacagacagttaacaaaatcagcaaccagactggtgttttttctcctcttttccagatacgatccctttcaaattttctcactagtaacagaagcatcgaaaaaatccatagcacttgtatataccacagaacaccggttcctgatatagccatgaccacataccgaactattcccggaactgattcaaaactttcaaaagcaccgctgattttcatattataatatcccagtatccattgaaatacaaaaagtccaatagtggaaggaaccaacagcttgcgtgttttatctcgaatacattcttttaaattatgcttttccaggtaatatctgactgtcataccagacaccgtaaataacaatgccatcatccatggatatacgagatattggaaagcatcctgcaactgttcttctttaaacggaccgattactccaaacggctgaacaccattgtacatataaatcacatgataaataacaacaatacaaaccgtaatccagcgaatattatccagatatattcttcttgtcttatccatactttccacatctttgcaattatttttaacatattttaccataaaaaatgtggtcttacgaccaactccccttaacattttctgctgaattttgttaaaaatcgttgcattatgctataccttcgtttacggctcattttcataatgtctgtatagcgctcccttagtcattccaagagtccctgcaatccgactcacagatacagcttcatatccttgtaaacacaatagatttgactgatggggtactctataactgtgatatgcataatttctatgctaccatagaccttgttcaatttgttctatgagcataccatttgcggtataaaatccattctttgcgcttattatacttttacaaactaaaaatatccctcagggtttcaaaccctgaggggcatctccattcaacttaaagacactacttttatttacatcgccctcttcgtgattctttttgtttttccggagatgatagggtttgattccaaacaggacatcgatatacggaagacacagtgtacagaagtctccgtttcgtcatcaatactccaggtaagcccccttcatcggacttgctgcatgctggctgaaaagtctcagcacaccttttttgtattttggttctaccggtttccagtttttccgtctttcggcaagaatctggtcgatttcctccatcgacttacgctctcctgcaactccgatgatattcagttttctttccataacatcaatttcaatcagatcaccttcttctacaagtgcgatcggaccgccgtcaaccgcctcaggactgcaatgaccgataaccggacctgtggatgcgccggaaaaacggccgtctgtaatcagcgcaatactctttccaagctctttatcactgctgattgcctctgatgtatagaacatctccggcattccgcttccttttggtccctcatagcggatgaaaacggcgtctcccttctgaactttatgcttcaggacagcatccaggcattcttcttcgctgtcgaacggtctggcacggagcacagctttaaacatctctttcggacatgccgtatgcttgatcacggctccttccggtgcaagatttccacggagaatggcaatacttccatcggttccgatcgccttctcatacggacggataatatcttcttttgtgaggtttacctgataccgtctgttgaattcctgaagccatttttcacatttctcatagaatccgttccgcttcagctcttccagattttctcctaatgtctttcctgtaacagtcattacatccagatggaggtgttccttgatttcttccatgatagccggtacaccgcctgcatagtagaagcactctgccggccagcgtcctgcaggacgtacatccagaagatatctggcatttctgtgcagtctgtcaaaggtatctccggtaatctcaataccaaattcatgtgcaattgccggaagatgaagcaggcagttggtgcttcctgaaattgccgcatgtacgagaattgcattttcaaagctttccatcgtcacaatatctgaaggacgcatatgttccatctttgccagtcttaccgcctgtcttccagcctctcttgcaaatgcaaggagatccgggctggttgccggcatcagtgctgttcccggaagtgcaagaccaagcgcctctgccatgatctgcatcgtagaagctgttccgataaaagaacatgcaccgcagctcgggcaggcattgcatttcgcccagtcaagtttttcttcatcaatctcgccgcgctcaaactttgcactgtacattccgagctgctccagagtcagcatttccggacccgcattcatggttccacccggaacaaacacggacggaatatcgactctggcaagtccgatcagatttcccggcactcctttgtcgcagctggaaagatagacaccggcatcaaacggagtcgcatttgcatgaatctcgatcatatttgcaatcatttcacggctggccaggctgtaattgattccgtctgttccctggctttcgccgtcacatatatcggtgcagtgatagcgtgcaccaaatccgccttcctctgcaattcctttccgtacctcttcctccaggatattcaggtggccgctgcccggatgactgtcaccatacgtgctttccactatgacctgaacctttcccaaatcttctttcgtccatccggttccgatgcgcagcggatccagctccggcgcaagttttctcattttctgactttttaactgcattatcttttcctccctgtaccttttatgtactttcggaatctttctacactttcttttgcggctgattttccggcagttacaatcatcagccgcattgaatccgccgcaaacgttgttccttccattcttctgtcttctcctaattcatctgatgttttttcacatcacacaccagcatttccttctattttcttgtgttacacgaatatcttttgttgttcagccttgaattcatccgatgtatttatcgtataattatcttatttaaaaatcaatattggaattttatctaaaaaaacatttttgtttttgtgtgttttgatactttgacttcgatctataaagatattatgataagaagtaataacggaacagctaagaaacggagcaaatcatatgatgactttatcacaggaagaaaaaggtcttccgcaaaaaatatcagatgacatcatcgcgcttattttagaggaaaatttgaagccgggagacaaactccccaatgaaaccattctctcgcagcgcctggatgtgggaagaagttctctccgggaagccatgaagcttctggcctcccgaaacattgtcaccgtccgccagggatccggaacctatattgccgcgtctcctggtatggtagaagatccccttggatttattttcattgacaataaacagaagctggttcaggatcttctggaggttcgttttctgctcgaaccttcgattgctgccatggctgccacacgcgcagatgaaaaagacatcaaaaaaatcactgcactctgcgatgaagtagaaacgctcttaaaaaatcatgaagatcacacacaaaaagatattgattttcacacagctatcgctttaagcagcaaaaacgttgttgtaccaaggctgatacctgtgatcaacagttccattcctctgtttgtggagacaaccggtggaatccttcgcagggaaaccatagaaagccaccgtgaaattgccgatgcgattgcctgccgcgatccgctccgcgcacaggatgccatgtatctccatcttgtctataaccgcaaatggatctgcagcctctcgcagaagcaatgaattatacaaaaagcccgggcacttggctccgggcttttttcgtttaaacaagcaagcacaaaatacggaaaggtgtaaatatcatcaccataacgaattccgaagcacaacaactccgaaaatcagtaataccactcccgggataaaaaagaggacacccccaagtaccggtttttgcggctgatattctgtgatattttttggattggacggttcataatagccggtacgctgcatgccgggcttttgcacggtgtcagatccatgacggctcgtatagtgatagacctctccgtttactgtgtactcataggtcggcagataacaaatatccgtgaccagttcctgattgccgtcacccttgtcttcccatcgctgggtttctgatttcgtctgtttgatcagtgtcatagttgtagtggctgtgtacttttggctgtcatcctcatactcggcataaacctttttccgctgccgggttcctagccaaaacagaagtattgctcccaaaagtaacccaattgccagacccatacatttcccccttcctgtctgctttcttttgtaagtattgatttatagtaactattcagtagccactgtcccgcgaggtgttttgacatgaatatgtcaaaatcccgagacatacaagccaaaatgccatcaccggtttcttctgtttttattataacagaacccttctttccgcactactatattattcatctgtgcaaaaagattgttactggttactgtccactccgttctcagcaacacgccttgcagaatatcaccagtgaacagcaacaaaggattccataaaaataatttcatgtaaactatgagaaacacactgcgcatcctcgcggagcgttttttactttacaggaaagtaatttcctgtagagtaaaaaagcttcccgggaaaatcccgggaagctttctgaatttatattttttattctatttcttccggctccatgctcagcacatgctcttcacttttatcagtgatatcatatttctttttgtactcgctgaagtatgtgtaatattcgaaactgtccgtcggatagatcttactgtcgcggatatgcatatccgggtcttgttcgccactcttcatcagggctaccatggcacttgcacaatgggatgcaattcgtccgaagctattcaggatatcgttaaatacagttccctcttccagcccgcaattgccattgctcagtcgttccacatggtgcatcttcagctcgtcacacagatgtgtgatgaccacaccgagaggagccaccctctgtgctgcctctttatcatcattcagaaaagcgttgcaggtaatattgatttcttcgcgtaccgcttccataacgatattcagctcattccatgctgccggtgaaaagtctgtgtgattgtcatgcatctcgttggacatatgcgcaatataagaagcatggtctccgatacgctcaaagtcaccgatcgtgtgcagatacagagatacctgacgggtctgtaccgtgttcatctcacgctttgtcagctgaatcagatattctcccagacggctttcatatttgtcaatcagatcttcttttctctgtactttgtcaaacttatcctgctgatattcattcaacagattcatggctctgttgacattcttgcgaagtttctttgccatgccgttcatcgcacggtgacactgtgcaatcgccagtgccggatagttcagcagacgttcctctaacagatcaaaatctgcttcgtcttccagttcttccgcactgtcttttaccagaatacataccagcttctcgagtttcggaataaacgggaacagtactactacagttgccacacggaatactgtatttaacagtgcgatagataccggtgtcatcaccatatctgtaaaggtaaagtgaacaaatgcattggctgtataaaagataacagaccacatgatcagtccgaacaggtcgttcagcagatagaccagtgcggttctctttccatttttattggcgccgatcgcagagatcagaaccggacaggccgcaccaacaccgattcccagtacgatagggaaagcacttgcaaatgttaagagaccggtaacagaaagtgcctgcagcacaccaacggtggcagatgcactctgtaaaactgctgtaaacaggatacctaccagaatacctgccagcgggttggaaaacatcgtcagcatcttgataaaggtaggattttcacgcaacggagaaaccgctccactcatcatctgcatacctgtcatcaaaatggcaaaaccaagcatgatatttccaatattcttatgtacggaacgtttgcagaacatacggaaaataatgccaattacagctacaacggcagaaatcgtcgcagtagaaaagatacttgcgattccgccaccgcttcctccaatataagaaagacacaggatccagccggtaatactggttccgatgttggcacccatgatgataccgatcgcctgcttcagcttcatcataccggagtttacaaaaccgatgaccatgaccgtcgtggcggatgatgactgaatcacactggtaacacccgtaccaagagctactcctttcaacggtgtatttgtcattcgatataagaaggcttccagtttgttacctgccaccatcttcaggccatcgcccatcaaagacattccaaacaaaaataatgctacaccgcatagcaaagacaaaatcattgaaaaaattgccatatttttctcctctgttgtctgacatcccggatctgtttccggaatggacacattctaaatttggtttctttttacttttgttttacttcttattttctttttcttaacatttcctttcttattatgccatgttgccgtcatgattacaatgtttgattgttttcctacgtgatttttatcatcccgtcaaaaatgcgccgttttttttgtgtaaatttcagcaattttccaactattttctctattgacatacttgtgtgtacctttatgtcaatttcgacttttctgttaaatttttaacatcgcagtatggctctccgtagaatgttttttcatttacgggaagaaaattggccggaaacaaaaaaacgatgtctcatcccctgttcagaagttatgaaacatcgtcttacttttacagatacgaacgaatatccaccgtaagtttttcttctatattaatcagccgtttggcaatatcctttgccttttcgtcagcctctgcatactggttcagacagcggtgcagcgacttgattcccatattgcatccatccgtcatcagatcggcgatcgttgcgtcagactcatccagcaccagttttcctttcgtcttcatccagaacatgccttttgccatcaggttcggttctttcctctcatcccggttaacttccagtttctgccggatctcctcctgcagtttttcatgtttatccctgcatccaagtaacagctgccggaatttttcttcttttacatacggaagtacctcctgaatcgaagcaattcccatctgtacaccggcgtcacactcctgtaacagccggattgtctcttcctgtcccatcatttcttactgcctcctttttttgttacatgcagatatagtatgacgtttgaaaaagacttttatgcgaatatttttgtttttctgaaagcctcatgcatgattgacgtaacacgttttgatgtatttttcagacttccacgattgctctgctccagatttccgtcagtttttccagagaatacgctgcattggcagggcttgtggacggcagttcttccatcggaaggttcagttccttatcctgatactttctgtaaagttttcctgctgtttttccattggtgtaaactttccggatctgcgacgcttccacgattatcccaagattagccggaaccacatctttgatactactgtcactggatcctatgatactgcactgttcaatcacatcatacacagcaacaccacgtctgagaagcatctcctttttctcttccaccgtttctggctcatcctccttcaataccgccgccagtactttccagaagcgattccgcggatgcccgtaaaaaaatgcctgttcccttgatttcacagatgggaaacttcccagaatcagaatccgtgattctctattatacactggtccaaagccgtggctgatgttttgatattctttcatatatctactcctttttttaaaaccgcctaaaaataagggaatcttcaccaagcaaggcgaatcttcccttattttctcattattttttatttcactgcccgtttcttcccggacaacactgttcctgcaatcagtaacaccggaaaaacaatcgctgcaaggattcctcttttcagatcttcggaaaacatgctggatacatagccgaccagtgtcggaccgccggagcagccgaggtcaccgccgagagctaacaatgcaaacatagcggttccaccgtttcgcatgacagcagatgccttgctgaagcttcccggccacataattcctacggacagaccgcagatcgcacatcccagcagggacagctgtggaagcggagacagggaaatcagcagataagagcctatacaaagcagcccgctgcccaccatgaacttgtcaagatcgattttatcaccaaattttccataaaacgctctggcacttcccatcaggatggcgaaagccatcggtcctgccagatcgccgatcgatttgcttactcccaaacctttttccgcgaaagtggacgcccactggctgaccgcctgctcgctggctccagcgcaaaccatcatcaataacaggatccagaacattttctccctgcacaggtcaagaattgtcattcccgtttctccttcttctaccagaggagcaatcggtgcttttgtaaaaatcagtccgttcacgaccgggatgatcgcccagacacacgcaaggatcttccagttttcaatcccgaaaattttaaaaaagcaggtggagatcagtacaactaccacatgtccccagcagtaaaatgaatgcaacagactcatcgctttttctttgttgtctgtcgggcagctctccatgatcggactgatcagtacttcgatcagaccgccgccgatcgcatagatcataacagacaatagaattcctgtatacgcatccggtaaaaggtttggcagtacgaccagtccgatcagtcccagcgcggatgccgcatgtgcgatcacgatcgataccctgtagccgatcttatcgacaaatccggcagatagcagatccacgatcagctgaacaccaaagttgagtgtgatcagcatggtaatcttactcaacggaatcccatacgttttttcaaaggttaaaaatagcaacggtacaaagttattgaccaccgcctgcaccacatagccgataaaacaggcatatatggttttctgatacttatctttcatcactttcctcccatgtgcgccccgttttccggagtttatcctgtttatattatatatcagcctgtgtcgtttgtaattgcatttatttcacttctttttatactatatcagtaactgttcagtaccttcacagttacgctacctgctgaatagttacattcattcatcctttagctgagatactttctgattgcagcctcctgcaacccttccccgatcacgatcaggatctcctgtccttctttgatcggctgttttttcagttcatgacgggttgcattgacctcgatccaactgccattttcctcctgcataaatcctttgatccggaaaactgccccacaggacggatctgcaaagatttttttcattccggcaagaattttctccaccggcatctgacgttccatcacatacaccgtgtcaaaactgttttcttctgtaaaatccattttctgataattttcctgcacataaccgcattgctgaatctttgcaaaatcctcatccgtgagcgccagactgccttttcggataatttcctgatccagtctgcgaccgcagcgtaccttttccagtgctctgttcagatgtgtgaccgttgcccggatctcttcctccgttgcctcttctgcccggctcaacacaaccgcacccgcatgtgccgcctccgaagccagcagatactcagacatgtccgaaagttccgactccagctttgcgttgactacggtaatgacatttccgatctgataccaccgatccagcggttcatcccgcagcacatcaaagaattcatccacatcgtatacaccggatggttccaccagtacccgatcatacccgcacattcccatcgcgatcagcttcgtgcgaaatctcctccggtgtgtttccctgtcgcatccaccggcgatcatctccaactcgcacttatcccccatcagttcctgcaataataacatatccacattgaccgcgccaaaatcattttccagaatcccgatgttcattccctgatccatcagatattttgcatagtgtttgataaatgtcgtttttcccgaacctaagaatccggtgataagatcaattgtaaccatagtttctcacctcacgttgtttccatatcattctgtcagttttacatgactacattatgttcggtattactcctgttctcaccttaccctcttgtcacacgatggatccgggtttcatcataacgatcctgctgggttctctcttctgccggatatcccagtgcaaagataccgaaggcccgctgacttgccggaataccgatgattttttctactttttccatcctgtcctctaacggcgcgattcccatccagacaccgccaagtcccacttcatcggtggcaagccacatattttccatacagatactcaggtcaatctgtgcgtactccggtacggtacattctttccggtaagcggtaacgatcaccaccggtgctttcgcagtgagttttgcgtatggtgttgtctcagaaagttcttctaaaatctccggatcttccacgatgtagaattcccacggctgctggttgcaggcagatggtgctgccatagacgccctcagaatataatccagtttttccggttctacctttttttcctgatactttctaatactgactctgtgaaataaatctgccattgttttgcctccttacatttttatatctgctatcttatcattttttcacaaaacttccaatctatttcttcatacagctgcttctgacattatttccgattactgttcagtacacccacagttacgggtaaaatccattccaggtcttctgtcattcttaaacataaaaagttcgaatccatctgttgtacaacaacttatggattcgaacttttcagtattccctacaggctgaacacacccagtgactgcagaagcagtgctgccagcagaaccggcgcgacgaattttaccataacaatatacagtttctttcttacgaacttatagccgccaatcgttacttcatcgataatggtctgtggttttactacccagccgatcaggatacagctgagcagtgcaacagtcggcatcagcaggttgttgctcaggtaatccatcagatccaggatctgtgcaaccgcaccattcggaagtttcagttcaaagtacaggacattgtatcccagacacacgatcactccgacaatacatgcatagatcgttaccagaaccgttcctttctttctgctcacatggaacctgtcaataatgttggatacaatcgattccatgacagatacggaagacgttaccgctgcaaaagataccatcaggaagaaaatcgttccgatgaccggaccggctgctcccatcgcctcaaaaatcttcggcagtgatacaaacatcagtcccggaccggcggacattccctccgttcccatgaacgtatacacggccggaacgatcatcagaccggccagcagagccaccgcggtatcaaaccattcaatctgattaatagaccgcatcagattggtctctttctgtacgtaagatccataagtgaccataatacccatcgccacactgatcgagaagaacagctgccccagtgcatcgacaaatacgatcacaaagtctttcagtgtcataccactgaaatttggtaccagataaactttcagcccctgcagaccggttcttgtcacaccgtgcgcatcgctgtgagacagcgtcatcgaaaaaatagagatgccaacgatcattaccagaagaataggcatcaggatcctgctgtaattttcaattcctttatttacccctttatagacaacaaaagctgtcaacaacagatagataaacagccagaggatcggctgccacatacttgtgatatagccggtaaaataaccgtcctgtgcggcttccaccccatgtccggtgataaaggttcccagatatttcagtacccatccaccgatggaacagtaatagggcagaatcacaaccggaatgatacacgccagaatgccaagaccgccccatttggggtgaatcatccggtacgcattcaacggactctgtccggtttttcttccgatggctacatctgtggtcaacagcgtaaaaccaaaggtcagtgccagaataatgtaaaccagaatgaaggttcctcctccatccttcgctgccagatacggaaatctccagatatttcccagtccgacagcacttcctgctgctgcaagtacgaatccaatagatccggtaaaatttcctcgtttgtttcctttctccatacgttactcactttctaaaattttgtaccttactactgtaccctgatttcagaatcttgtctatcattttcctgatttttttttggttttttataatccttcagcagacaggatcccatgaggtgttccgacatgaaaatggttaccgttcactccgttcccagtaatacgctttgcgatgcacagaatttatactaatcgcataaacagatatttttaacatttcccgcgaaatcatgttataatttaatctgatacgaatgaagcttactatctttcggaatatataagaataaatggaggaactatggagcatcaacgactgacaaataaagaagtgaaaaagaaaaaccggaatcagattttccgttatatttgtacccatggaacggtatccaatccggatattgtctccgacctgcacctgagtctcccaaccgtgaccaacaccaccagagaacttctcgaatcggggcttctgcgggatctcggagagatgcagtccaccggtggccgcagagccagagcgctgtgtgccgcttcggattatcggttttccatcggactggatatcacccgaaatcatcttggcatccttcttttgaatctgaccggagacattataaaatatgaaagaatgcaacttggtttttccagaagttccgcctatttctccgaagtctgtcagaaaattgatgcttttctcctggaaacggagatttccgaagaacagatcctcggtcttggcatctctcttccaggaatcgtcgatccggtgcagaaaatgatcacttattcccatgccctcggtgtgcgggatctgcctttttcggaaatccaatcgtatttcccatggcactgtacctttttaaacgatgcaaatgcaggtgcttttgcggaaggcatcggttcggatctgccttcctccttcttttatctttctctgagtaacaccgtgggcggtgccatctttcacgatggcaatctgcttccgggcgatactttccgctgtggagaagccggtcacatgactctgattcccgatggaaaaccgtgttactgcggaaaaaccggctgcgtcgatgcctactgttccgccagactcctctcggatctgtccggcggacggctggaagatttctttctcggacttcagcagaacaacccggactatcgttctgtctgggacacctatctgaaacatctggctgtcgtcatcaacaacctgcatatgctcctcgactacgatatcgtcctcggcggttatgtaggaagctttctcaccccctggctcgatacgatccgccacctggttgctgaacgcaatactttcgaagacgatggcagctttgtaaaactgtgtacctaccagaccggagcggcggcttatggggcggcgatggatgtgatggaagagtttttacggacggtgtgagttcctgacaggattcattctgatacccaaagagatccaccagattttcagaaaaaatctggcggatctcttttctcttatttcaaaatatgttttacagatatgcaatactctgattctcaaataccgcacttccatctgtaactcccaggcagattccctccccaggatttgtatacatgcgggtattcatagcaactccgtccacatacagtgtagcaatcgtatcatccacgataatctgtacatgatattttttccccggaaccagacgaatcagacgttccagtcccatattgttcatctgcggccatggccagttcggagatttctcgaagatcacacgatccttcgggcattcaaatgtaaaggaatagaattcatcatccgcttcctgagcccgtactccgattgaaaatccacgggtaccctcagcaaatgtgacatctgcttcgtatcgatagcagtcaccggtcttcgttactacatgctgtaatgctcttcctgattctttttccagttttacatcatcaagctttttctcatccttaaatgcattccataccgtatccgggatccggcagcctaaagtgccgtcttctctctgatacagttcatgtgccacaaaagttcctgcccagataaaatcttctttatctgcctccggtctgtaccagagatttgcactgtctgtctcgttggcacgtgtcgggacccatccgaacagaatcctctgatcattcaacataaaggttcttcccgcataataagctcttccgtcaaaggcatcgtcatccggtgcgatccagggtcctttcaggctttttgccatacggtacacctgtgtggatgcatgggaatattctgttgtgatcagataccaccagtcgcccatcttgaaaagatccggcatctcatgcatggtaaacagatccggtgcccagaaatctccctggaactcccagtctgcaagattatctgatgtaaaatatacggttctccccgttgttttatgcttgtctccttccaggcgtgctcccaggatcaggatatatttttct

SEQ ID NO: 648 - DNA, 103674 bp, Oliverpabstia intestinalis
  source 1..103674: mol_type = genomic DNA
ggtaattggttaccctataatgttgagttttcatatgtaaaattggattgtattgagaatatttgtttatttatactatatggttttttgttaaatttagtaagaacgaaaacgattagagataatgttagcatagtgtttctaacatcattaggtatagaatgttttcaaattattactttgtcaggtacatttcaattttctgatatattttataatgtcattggagggataattggaattcttataagtagtggaatttatcacaataagcaataaatttaagaggaagaaaaatatgaaaacagtattagttattatggccgccggcatcggttctcgattcggcggtggaattaaacaacttgctccagttggtttaaatggagagattatcatggactattctattcatgatgcaatagaagcaggtttcaacaaaatagtttttattatccgtaaggatattaaggacgcatttaaagaagcaatcggtgatcgtattgaaaagatttgtaaagatcttgatgtggagattgcctacgcatatcaggaattaaatgaactgccaaaaggtgtggagcttccaacaggacgtaccaaaccttggggaacaggacaagctgttcttgcttgtaaagaagttctgcatgagccatttgcagttataaatgcagatgactactatggaaaagaagcatttgttaagcttcatgatttccttgtaggctatgtaccagaaaaagccaatcagttctgcatggcaggtttcattttaaagaatactttaagtgagaatggtgccgttaccagaggtatctgtgagacaaatgaggaaggctatctcacagcagtacatgaaacttccaatattgttaagactccagagggtgcagcagtagacaacgatggacagcttacttcaattaatgcggaatcctacgcatccatgaatatgtggggactcacaccggaattcatgcagactttagaagatggatttaaagagttctttgcaaatatgggagacaaagatattctgaaagcagaatatttactgccaatctacatagacgaacttcttcaggcaggaagagtttctgtaaaagtgttagatacgaatgacaagtggtttggagtaacctataaagaagataaagactatgtagtgaagtcatttgctaaattgatagaaaatggtgtatatcagagaagtttgtttgaagatttgatataaatgacgttagtgagggagaacaatgtaaagtaagataatcgaaatatttaataaaatggcatatcgcatataatgtattatcagcactttatcagccctgaatattacggtgcggcagagccgccagtccggtgtggcgagagccacctgtccggactaacggagccacctcattttgtttattaagttactttgccattgctggatccagtccatatacttctctcatagagaggtctttagatgggtcaacactttcaatatcgatcttataggaatcatacgatatacgatccatgatggcatcggcaagagtactttcaccatcacagatttgctggtaccattcactttcacggaactgagaacaaaagatcgttgaagatttttttcgtcttttatgtatcagttcaaaaagattcctggcttcagcttctgtcagtttaagaagcagccactcatcaatgatcagtactattggcttggtgtatttcttcaggacagtcgagaaagttccattgtccctggcagcctgtaagtccaataatagatcaggaagccgtatataccgtactgagtaatagtgcttgcatgcttccatgccaaaggcacaggccatataagttttaccacttccggttgctccagtaataaagatgttccggtattctgtaatgtattcacaggttgccagacgattgatcagtgctttgttcagctttcgtccagaatggtaatcaatcgctgcgatgctggcatctggctgttcaaactcagcctggcggatcagccttttcagacgattgtttttgcggttgctgtattcgacatcaacaagcatgccgaaccgatcttcgaatggaacttccttcattgcaggatcatccatctggatgcggaatgcatctgccatagcagtcagacgcatttcaataagtttatcgattgtactttgatttgtcatgagtttttacctccatagtatctggctcctctggttatgccatgtggttttactgcttgagatgattctgattcggtatcaggtgcatcctttgttgcagccaatagatttttgatacttttatagctgggtttaccggaataagagagcgccttagcgcagacctgttccagtttttctggcgaatatttttctgccagtttcagtaagcccatgcagcttctgtaggattgctgttcaatcctgccggaggtaagtattgcatcgacaaccttacttgtgttaattccaatcgaatcagcccacttacggaaccggtcaccattccattccagatatttctggtgttcctgcggcatatgttctgtcactgtagaatactgaccgcttcgtccatagagtcgtctgtgagaggcaatacgattgtgattataaaatatttcaaccgttgtatctgttatacgcacatcaaccttatttttgatatactgataaggcacggagtagaatattctgtctactgcgatgtgatagttaaactggacggtggcttgtttccactcagccagttcaaaaggtgtagcaggcaacggagccagtaatggcatttcttccccaagaaataaactgagtctgctacattcctttttctgaaatttacgggcgttgtaggcatccagtttttcacggattgaagcatttaattctgcaagagagaaaaactgctcattgcgaagggctgctgttatccatgtggatatctttcctactgatccctctacattcggtttatccttgggtttccggactctggccggaaggatggcgagattgtaatgttctgccatctcatgataagttgtgtttaaggcagtgttgtaccagtcactctttttatgattcactgcggttgtacagttatcagaaacgagcataggtgtgacacctccaaagaaatcaaacatctggacatgagctttgatccagttgtcggttttctcattcatatatgcttttacaaaagcatactgactgtaagttaatacacctacaaatatccatgcatctgtgatttctccggtgtccggatcaatgatgtgggcagggtcaccggcccagtcaacttcaatctgttcacctggttttctggggatatgcatggtagccctgcgtttttcttcatccttctggatgtagtagcagaactgagaatacattagaggctcttcgctgctcatgcggcactcctcacagtattctacccagagaagctttttgtttacaccatttcgcagaagttctttgcgaatgtagtcaaagtttggcatgcgtttattcgttgccgacttatccttaggaaacatcagctcctctaatgcgctgtcggtcatgtcgaaatccagcggccatgaaagcttgatttccgctgcctttttcaaaaccttagcgactgtgtttctggatacaccgcaactctgtgcgatgttcctctcactgaatcctaagcttttcaagcgtaggatttcacgatacttggtcataacttacgacctcctttatctgtattcacaccaaaggtgtgtatttacagtataaaggaaatatatgtaatagagcccaataaggtggctctgaattaccggaatatatggctctcattctccggaatggtggctctcaaagtccggacaggtggctcaaagagccccggaataatcaagcccttttaggctgccgttctccttgctttttttatgcagggtaggtggttatctattattctatttgagatattctcgaaagcgaaaaaataagaaacagaggagagttaatcggagcatcagtccgagcaggaaatcctctgttttaggcacaagacgattggattcacatgaaaataggagttggaaaatggcaggaagaccaaaaaagaaaccagaatataatccagaacttcaatttaacaattttcttcaagagttaaaagatgcctatgaagaagcagattccttaagaacgctggcagatgagctaaatattagtctgcttaaactccgtaagctacttattactgctggtgtatttacatcagatatatgtacagaaatcaatgatctgcatcagtcagggaaaaagattccggagattatgaaactcacaggtctttccagagcatcggttcattcctatttgccctacactaagggtctttataatgcagcagagataagtctaaatgcggagcgatgccggacatataagaatagacaagagcaggttcggcttctacaggaaataccatcagaggaaaatttgtggcaggctgttattgcatttcaggagtatccatttaaaacggcaacaggattaccgtttcggtataaattaaaggttggcaaaaacggagagtataacggagagctgctgatagaccggagagagaaaagtaagagccttgcctggagtagtgtggtgctggcatttgaaaatagtaagaaggtttcagaagaagtgaagaagccgaaggcacttggagatattagaggagtttcatatatttatccgatactatggcgatttggcttgatccgagttccggaagcaatagagaagaaaatgggaaagcagagataaatccctgcttcattgcctacgagtgattagattaacatgaatatattaaagagtttctcgtaaaatcgaaaatgcatcaatgattccttgtttgtaggcaatccgtatatattctatagatgaaatgttttcagcagtgatagcggcatcaacagtgtcccattgttgaggagttagattaagatcccgtattttttcattggctttattgcattttttctgagctttttgatattttacatcgtgctttattgcaataggtaatgttgtttccatacgaaaagctgcaagctgatccagaaaactttctgatgatgtcagactgtttttaggattatgaatgaaatattctgtgagtgctttatagagattcttttttagtttctgttcttttttgctcattagataaattcctccttaaaattgtgcaagtaaataacggtataacgttaatttatcatcagtttacggaaatgtcaacggtacaccgttaatgaacaaaggggaaatcctttatactgaatatatattgtgatttaaggagaatttgcatgacgtattcagatgccataataaagagattgactgatctgtgtgttgagagagggataacgacaaataaacttgctacattgtcagggattacgcaatcaacgcttaatagtatgatgagaggagaaacaaagaatccaaagctgaagactttgcgtaagattgctatgggatttaatatgaccgtttctgagttgctggattttccagaaatgaacgaaatggaatttgaggatgaatgaacgaaaatatgttcggaaaaattaaaaaacgtattgacttacgaaaatttgttcggtataattatttctatcagaaacgcaacgtttccgatagaaaggtaaggtgaaaagatgcggcataaaagcgaagaattgatgaagcagattatggattatgcagaacagtttcagttgctgaatcatcgttcaccttataccagcgaaatcgcagaggcgctcggtatagtcaagagtacagtatacaagtaccttgttgctatgaatgacagaggaatgttaagctaccgcaatggggagattgttactgagagaacgaataaaatatctctacttacaaagccggcggcagtacttgggtcagtatcctgtggtatgccacaactggaggaagagtatattgaggaatatgtttctcttcctgtttcattatttggagagggtgagttctttatcttgcgggccagtggagattctatgatcggagcaggtatcaacagtggagatatgattgtgatccggaagcagaatacagcttcggatggagacattgttgtagcacttgtagataatgaatccacattaaagcggtttttccttgagacagaaagaagatgtgtacggttgcatccggagaatctgaagtacccggatatttatacacagaattgtactgttcagggtgttgctgttcatgtgatcaagtcattggagtagatgatatggacagtagcaggtgtaggttgcgatgagattgtcagagccaatcccaggggaagatcatatagcaggtggcatggcttcggtgctacggaatcgcctgctattaactcatcaacggttttcatttcccttatccgtttgagtgatagtttgtgtagatattacttggaggattattgatgagcaaagaaccattatttgttacatgcccggtatgcggcaaagtgaaccagaaaagcctttttacctattcagaggtgcgttgccagagatgtcatagagagctgacagcatttgcagatttgggtgtagttgttggtattgatatgaataagaagcggtcgaaggaagaagttgatcgcttagagatgtatatgtcacatctggtaggagttctccgggatacggaagaatgagaagagtaaagtatagtgatacaatttaatatgcaggaatgagaatatctgtgaatctgtaatattagacagcaggaatcttcacatacagcatggatattcaagagtttgctgaacgtgttggagatggcacagaaacatcaggaacccggcaaaacatatgcaggaagtttatggagatagtatacctatatattatcaacatagtgattaagcatagtgttttgtcggttttttgcgtttttataccagaaaatggataattaaagtagacagaaataatttcttgtgataaactcagtatgttaagaaaaataaataatttacataaagaaaagtttatttctataagactacaaatatttagcctggaataaacagtacaatatacatacttgaggatgatcttacatagttggaacttgggtcttgctatgcacatttttagtatgtaaggagattactgtttatttcaggcttttttatttcccaaaatataaaagaaagggggtactgcatgtctacgaaagaaaaaaacatggatgaaagaattgcgtttggcaattctctaagtgagaaacgtagagaaagtggtttttcgcaggaagagcttggactaaagattggaaaaagctctaatgcagtatcccggtatgaaaatgcagagaatacgatggatgtacatacctttgcaaaaactgtaaatgctttaaaagcaagtccatatgaattacttaaagatctagaagtaccagaacccgatagtaagatagtgtctttgttcttccagatacaaagattagataagaataaaaagaagtttgcattatcaatggtggaatccatgcttgataatctggcaagtctttaaaaatttaggtttagcacttacttataaaaatatgagtaggtgctttttttgtacaaaattttatttccacagatgtggggagaagtataaggatttccacacatctgccggggaaaaacgaaaatgattattctataatcaaagcatcaacagcgaggtgctgaaataaggaggacagaacatgactcaggaagaattagagtttcgccgtaggtgtccctacgatgcctttggtgattattcagatgtattaaaggaaattcgtcagaaagaaaaagagaacaagacggataccgtatcagtagtaaatagaagtaaataatgctggttgaatcttagcactgtgattgtgtagcagatttttccatacagaaggcagcaggctggagcttcggttccgctaataaaaaaaattagcggaatcggggtctatttagcttagctgcctttctttttgtcaccggttcctgcgggaaaggtggcaattatgctgacattaagaacactgaaagaactgatcgacacaccaaagagaggagaaaaacttcctacaccgaagcagcttcgtacaggggaatcaccggtagttgctcataaaataacaggagcaggagtgaatgaggtacatattatcgtatatcagtccgggtatgcggtttatggtatcggaaacagagcaacggtatttccggtaaatctggaacttggttatggttattcttctgtgacagaaaagaagagaaaggaagatgagaagtataatacttggaatccagagacaggactccgtgagaagaaatatttctgtgaattagaggaaagcttttttgaaaaggaagaatggtatctgcgtctgatgctgattggtgaggaccggctggcacataatctggctacccgtgatcggggacgctgcatttcattcaatggcatttctgaggattttgaaggaatggaagatgaattgatggatgtagaagaacgtgtgaaccgtcagcagattgcagaagagatgatgagtgtacttagtgataagcagaaaaaagtagttcaggaattttactggaatcaaaaaacacataaacagattgcaaaggaaaatggagtaaagagaaatgccgtaacagaaatattgaaatatgctcttaataaaatagagaaaaattatgatgaagatggcaaaaaaagataagtaaaatgagaaggggaagctgcatgtgtaaagcagtttctctgtaagtttattttcaattctaaatagcatttatattctaaaaaatttttttgaaatttttctgaccttttgccctctaccgcctgtgattagtggaaagagggcaaagtcattcaagacaacatttctaaatgatttaatcccaatccaccgtaccttgataactgaataaaaggtcagaagagaatgaaagctcagctacgcattttgcggccagtggaagttctcttctgatcggaaatgctcaatccttatttttgttatgcccggttcgccgggcgatgacagtagaccatgcgtcggagcttttgcttttgcaggttccggcgtatgactgtgctgtcatcagtaatgattttggcacaaataatttaaaacggggtgatgcctatgatttgattgtatcagacaggtgaaagcctgtaaaccggtaacagaaaaaataaagcaaagtgaggtattgagaatgaaagggacattgaaaagagtaatgtctggagtattatctgttattacgattgcaagtgctgtggcacagccgataactgcttatgcagcagaaccggaaaaggcagcttcttcttttgaagcacagtatccggaactggaagcggtgaaagataagctggctgaggatgagattttaactgccaatgattacagtattgattatggttctgattttgacattaaggtggatttttccggtattgaaggaatcaatgatgccaaagtgaaagtagagctgtatgaagcgaagaatgaggcaggagatgattttgacacataccaggcagatacctataaaacagtttataaggtagagccagtcagtggaaatccttcttatcgtatcagtcgaaatgtaaccgtaaaagaaccggaaacggaacagctgacagaaccaaatacttctgaaaataccgtcggtgaaggaaatgctggcgagacagaagattctggtaatgcggaagaagatgccgatgcagaagggcagacggaaatagtaacagatctgacagaagaggaggaagttacaacagatgaagagtctggattaactgtctctgaagtaatggatcaggcagaggataatggtattgacctttattcaatggaagaaggggaagcggttacttttatggcaagggaagcatcaacccgtagcacaaagaaggtaactgtgaccagaggagcctgctatcagtattcggattatgggtatggaagctatctgacgtataagtacaccgtgaagtttggaaatgtttctgcaaccgcttattgtatccagccggagaaatccagtcctggaaccggaacatacgatattacaaagctgagtgacggtaagaaactggctaaggtttgctattatggaacgaaggcggcaggtgatgaaggattctttacagaagagaacggttatggcaatttaagtgcaggtgccagatttattctggttcatcttgctgcatcttatgcaaatggtggagattccgctttttccggagcaagcagcaaagcaaaaacacttgctatgaaactgtataactactgtatttcacagccggagatcccggatgtcgatatgagtttttcggatgcaaatgtaactgcttatgtagatggcagcagccagagaacaaaggagattacatttaaggcagacaaactacagagtatcacgatgaaacttccaagtggcgtgaagcttcataatgtaacaagcggaaagacaagtaaagccggggaagccgtagagatcattggtggaacgaagttttatttatcagcaccattgacacaggtgcaggatgttgcaggaagctggtcagctacgatgaaaggaagcgtaacaaaagactattctgcttataagatcagcacagggtcaggttcacaggatttagcactggtatttggtgaaggcgtggatgatgagaaatatgtggactttaaagtaacctgggtacagtatgcaagcgttaaggtgattaagaaagatgccaaagcgaatgcgaagttgtccggggcagtgtttggcttatacagcgatgcaaactgtacgaagctgatcacaaagttaccggcgacagatgcaaatggtgaatcgtctgtacagatcgttaagacacaggacaccgtatatcttaaagagattacagcaccaagcggataccgtatcaatgcaaccgcttacaatgtgaaactggaagtcagcaagaccacaaccgttatagttccagatgaagaacagctgggacagcttaccgtttataaagaaggtgaggtactggttggtgcagatgtgacagagaacggtacaacatttaagtatgagaaacgcagacagaaaggtgcggtttacgatgtgtatgccgaagcagatattaaaactgcctatggtacaaaagtttacagcaagggcgatctggtaaaagaaaatctgacaacagatacgaatggagccatcgttcttaaaaatctgcatcttggtacatatgttgtaaaggaaaagcaggctccgacaggattttataatgccggagaggagaagaaggtgactctttcttatgccggacaaaatgtggatgttgttttctccgagacaacttttatgaacgacagacagaaagcagaagtgattgttacaaaacaggatgaagatacagaaaatcctctggatggaggaatctttggactttatgttgcaagtgatattgccaatgcggatggtgcagttgttgtgaagaaaggtacgctgatccagaaagcgacaacaggagcagatggtacagcaaagtttacagcagacctgccgcttggattttcttatgatgtgaaggaagtgcaggctccggaagattatgtgagaaatacagaagatgtttatacgtttgctctctcatatacaaatgataaagaggcaaaacagacatttaagcatacattcaaaaatgaacgtgtgacagctaagatttctctgcagaagcaggataaagaaaccaaaaaggcagttccacagggcgatgctactttggaaaaagcagtgtacggactttatgcccgtgaggacattgtgtattcggacggtgcgactggtgtggtctataaagcaggagagcaggttgccactcttacgacagataagaatggacaggcttctgtggatggattatatcttggcaattactatgtaaaagagatcactcctccaaccggttatctggcagatgaggaagaacatgatctgatctgcaattacgagggtgaccttgtagcagaagtaaaacgtgattgtctgtctctggagcaggtgatgaaacagccattccagattattaaagcggcaaacaatggaaagaccgatgcagacttactgaaaggggcaggatttactgcttatctggtatcttccctgaaagtaaatgaagatggcagttatgattttgattctgccaaaccagtagtgatcggagaaaacggtgctacagaaatctttacagacgagaaaggttatgcctgcagtattgcgatcccttatggaacgtatattgtccgtgaggcaacaactccgcataactatactccggtagatgattttattgtacagattacagagaaccatccaagcactccgcaggtgtggagagtgatgctggataaagagtttgaagcgaagctgaaaatcatcaaacaggatgacgagacaaagaaagcagtgcttcagaagaatacagagttcaagatcttcaacatggacactgagaaatatgtggagcaggtaacgacttatccgactacggtaaaacataaatcctattttacagatgagcagggatatttgatccttccgcagaatcttaaaatcgggcattaccgcattgaggaagtaaacgcaccttatggatatactctgaatgagaattactatgaggtaaatgtagattccaacacagcatatcagatggacggaacttctggcgatgtcatcattgagatcgcatatgaaaaccatccagttaaaggggaattgaacatcgtaaaacagggtgaggttctgaacggatttaaggacgatttcacttaccagaaagaaaatctggaaggtgcggtttttgaagtatatgcagctgaggatatttacacagcggatttccagaaagatgaccagggcagccgtattctggaatatgcttctggagcattagtaggaacggttacgaccgataaagacggaaaggctcagattgctgaccttcctcttggaacgtataaggttgtcgaaaagacagcaccagagggctttgtgttaaacgaagaggcacagaccgttactttctcttacaaagaccagaaaacaccagtgatcgagcagacagctatctttgagaatgaccgtcagaaagtagaggtatccgtagtaaaactggatgctgagaatgagacagttgtagcaggtgcagaatttggactttatgcaaaggaagatattctcgctcatggagaagtgattgtgaaagcagacaccctgcttggaaaagcagtcagcaatgaagatgggaaggcagtgtttgaatctgatcttccattcggaagctattatatcaaagagcttgcggctcctgccggttatgtatcttcatttgagacactggaagtaactgcgaaatatcagggacaggatgtgaaagtggtaaaactggaatctgtatttaagaaccagccaacaaaagtaacattcaagaagtcagatattactacaggagtagagctttctggtgccactcttacagtgcttgataaagatggaaatgtggtagatacatggaaatctgttaaaggggaagaacatctgattgagcgactgactgctggggagacttatacacttcgtgaagaaatggctccttatggttatctgatggcagaagagatcacatttactgtagaggatactgcagaaattcagaaggtggaaatgaaagatgacgtaccgaccggaacactgatcatcaataaaaaaggtgagttcctggacaaagtatctgcactggattccgttggtggctggctcaagcatctgtttgaatatttctctggttccttgaaagagattacttttgaagtttatgccttagaggatattaaagcggcggatggtgagagtgaggattattacaaaaaggatgcactggtagcaaccattacaacggatgagactggtgtggcaaaactgaccgatcttcctcttggcaaatattatgtcaaagagaaggagaccgcaaacggttatgtccttgatggggaaacccgtgaggttgacctgacttaccgtgatcagaatactgcggaagttacttactcagcagactggcagaataaacgtcagaaggcagaagtgaaagtgctgaaaaaagcgaaagattctgaccgtgtactggaaggagctgtatttgctctgtgcaataaggatgatattgtcaatgcaaaaggtgatgtaatcctgaaagcggatacggtgattgaagaacaggctacagataaagacggaaaactgacctttactgcggatcttcctcttggtcatacctattatgtgaaggaaacttcaccagcaccgggatttgcgactacagatcaggtacaggagtttacttttgagtatggtggagctgaaaaagagactctttcctatgagtttacttttgaagatgaggctacaaccgtagaatttaccaagacatctctgacggatggaaaagagattgagggagcaaaactgaaagtgaccgatgaaagtggaaataccgtggatgaatggacttccggaaaagagccacatatcattaaagaactgacagttggtaagaagtataccatgacagagacacttccagcggatggctatgttacagcagagagcattacctttacggttgaaaataccagtgaggtacagaaggtagaaatgaaggatgatgtgacaaaagtgcagatttccaagaccgatatttctggtaaggaactgccgggagcgaagctgacaatccttgacaaagatggaaagacagtggagagctggacatccgaggaaaaaccacactatattgaaatgcttccgattggagaatatacacttcgggaagagactgcaccggatggatacctggtagcagaagatgtgaagtttacagtaaaagatacaggagagatccagaaagtagtgatgaaggacgaagtgaagccgacggaaacaccaacagagactccagcggaaacaccagaaacaacatcaacaccggaaacaaaagatactgagacaacaaagacatctacttcaccgaagacaggagataacaccccgatccttttctgggtcctgctcgcaggagttggaatggcaggagttggaggtactgtgattctccgcaaaaagaagaaaaaataagagatcctaagatttcttaaagaggaagagggcatttatggacaagtgtttcatagatgccctttttgccaatactgataaaaaagtgaagggagaagaaatgggatgaaaacagtattgatcgttgcagggattatcgtattcctggtatatgggtttgttttatactgctgcataaaagttggaaaggaatccgatgaacagtataacaagctgagagagggaaaggagcaggaagatgacagaagtagggtatgcaagtgataagccttcggactgtgcgtattgttacttctttagtgccgggagaaagaaatgcaaaaggaaagaatgtttttatcgtatttcttctccgccacttcgcaggaaggtaactcactgggagccatgtgaaggctgtccttatggaaaacatactccctgtctgggttactgcattgtgaaggctatgaaagaagtgaaggaacatcggaacacaggataatacatatgaatttccgtatcattacggtgaagaagcggagtcctattctttttaccgtgtgcctaaagtcctttttaccaatacgcagtttaagagcctttcctgtgaagcaaaattgctttatggacttttgcttgaccgtatgcagctatctataaagaaccggtggctggatgaagagggaaaggtatatatctatttttcccaggagcagatctccggcatgatgggatgtggcttgaaaaaggtagggaatctgttagcagagcttgacagtcggaaaggaattggattgattacgaggatacggcaggggttaggaagaccggataggatttatgtacgcaaatgtacgcaacaggatatgtataaaaggaatatccagacacgtcaaaatgacatttctggaaatgccaaaatgacaggtacggatatgtcagaaatgccgggtaatgatactgaggataataagactgaaataagtgacactgataggagtgatactgagtatctttctttctattctgaagagagtgaagaaatgcacaggaaacgaatggaaagagaggtataccaccagatgatcttgactaacattgggtatgaatatctggttgatgtgtataaccgggatatgctgaacgagattgtggaactgattgtggatactgtctgttccgaacaggaaatgatacggataggtggggacagaaagccaaaggatgtggttaaaagtcagtttttgaaactaaattctgaacacatccggtttgtcctgaaatgcttgaaggagaacaccagtaaggtaatcaatatccggcagtatttactgacagttttatataacgcaccacttacgatcagcaattattattccgcactggtacagcacgatatgtatggtgacagtgaagaataaggaaaggaggagtgagataagtgcaggatgaagtaaatgaaaaaaccgtatcgctttgtatccgatgtgggaaggttactgcgaatctgttaaaggcagcaatgaaaaaagctcttactaagatggaacaggagaaacaaaagctgcaggggcagaaacagcctaagcaggataaagaggataaaacctataagggaaagcagagtatggataagctgatgaagcagaatgtacagctttccaatattgagatcacggatggaaatatcaaatcgtttgagcgtgtagccaaaaagtacagcattgatttcagcctgaaaaaagatgtgaacgctgatccgccaagatattatgtgttctttaaagccagagatgcagatgtaatgactgcggcttttaaagaatatacaggacaatcgctgaacaaggataaaaagccatctgtaaggaaaaagcttcagcaggcgatttccaagtcgcttaaaaagcacagagaactggagaaaacaaaaggaaaggagaaagagccgtcattatgagcagattacagaagttgcttggtgtaggaaaaggatacttggagagattaccgccggtggatgtacataagctgctttggatcattctgctgaatcttccgtatatcatgattttttatatgggaaataagctggcatggttgtatcaatactgtgcaggtaattccatgatagaaagactgatggtgctgatcttgaatttccagctggcatttagcaggattcttccaagtatgcataaaaatgaattgctggttgggttgaccggagccgtgggagtgaagctcatggtttatctaaaagggaaaaatgccaaaaagttccggcagggagtggagtatggttcggctagatgggggacagcaaaagacattgcaccctttatcgacccaatatttgagaacaatattcttcttaccatgaccgaacggctgactatgaacggcagacccaagaatccgaaatttgcaaggaacaagaacgtgattgtaattggtggatctggttccggaaagacccggttttatgtaaaaccaaatctgatgcagatgggaaaatatatcagttatgtggtcacggaccccaagggaacgatcatcattgagtgcggaaagatgctggtacggcatggatataaagtgaaagtattgaatacgatcaatttttccaagagtatgcattataacccgttccactatatccattcagaaaaagatattctgaaactggtgaatactatcatggtaaacaccaaaggggaaggggagaagtccagtgaggatttctggacgaaggcagaaaggcttctgtactgtgcattgattggctatatctggtatgaagcaccggaggaggaacagaactttgcaacgctgcttgaatttatcaacgcatcggaaacaagggaagatgatgagacatttaaaaatgcagtagatatgctgtttgaggaactggagaaagaagaaccggaacactttgcagtacgtcagtataagaaatataaattagccgccggcaaaacagcgaagtcgattctgatcagctgtggagccagacttgctccatttgatattgcggagcttcgtgagatcatgagctatgatgaaatggaactggatatggtaggagatcagaggacagcattgtttatcattatttcagataccgatgatacgtttaactttgttgtggcaatgatgtacagccagttatttaacctgttatgtgacagggcagacgatgtacaccatggacgattaccatatcatgtcagaatattagctgatgaatttgcaaatatcggacaaatcccgaaatttgacaagctgatcgcaactattcgtagccgtgagatttcagcatccattatcctccagtcgcagtcacagctcaagaccatctataaagatgctgctgaaactattttaggtaactgcgatacgatgttgttccttggcggcaaggaaagttctacattaaaggagatttccgagacactgggaaaggaaacgattgatttatacaacacttctgatacccgtggacagagccgttcttatgggatgaattatcagaaaacaggaaaggaattgatgagccgggacgagcttgcggtcatggatggcagtaaatgtatcctgcagcttcgaggtgtcagaccgtttttcagtgacaagtttgatattaccaagcataaacgatacaaggaattgtcggactatgataagaaaaatgaatttgatgtggaggcgtatatgaggcatcggatggaagtgaagctgacaaggacacaggagtttgacctgtatgccttttcagaggaaagtctggcagaagaattaaatacagaaaacaaggaagcagggcatgtgaaagatttggacacatagctctttttctttgcccttatagggaggtgatggatttgagagatcatgaaaggccgcccataagggcagagccggaagagacttcttaaaacatagatagaaactgataaaaagcaatgatttgaaaggagacaacgactatggcgttttttaatcaggcaattaatattttacagactcttgtagtagcgatcggagctggtcttgcagtatggggtgttatcaacctgctggaaggttacggaaacgataatccgggtgcgaaatcccaggggattaagcagctgatggcgggaggcggtgttgttttgatcggcacccagcttgtaccgttactttccggtttgtttagctgagaaacttaggagggagatgactcatggatcggatatttgaagcgattgaagaatggatgaggaatcttctgacaggcatggtaagttccaatctgacaacaatgtataccgatgtcaatgaaaagaccggtcagattgctgctcaggttgggcagacaccgcagggctggaatgggaacattttcagcatgatacaaaatctttccgattcggtcattgtaccgattgccggtatgattattacctttgtgctttgttatgagctgatttccatgttaacagagaagaacaatatgcatgacattgatacatggatgttctttaaatatttttttaagatgtgggtggcagtctggatcgtcagccatacatttacgattaccatggcggtatttgatgtcgggcagtcagtagtgagccgggccgctggtgtcatcagttccgatacagcgatcaatatagatacgatgattaccacgatggaaacggcaatggaatctatggaaatcggtgaacttgtcatactggcactggaaacgatgcttgtgagcctgtgtatgaaggttatctcagtctttattacagtgattttgtatgggcgtatgattgaaatctatctctattcgtccgttggagctattccatttgcaaccatgtctaaccgggaatgggggcagattggaaacaactatcttcgtggattgtttgcactggcatttcagggattctttatgatggtctgcgtaggaatttacgcagtcttagtagcgaatatccagatgtccgataacatacattctgcattgttcggcgtgatggcatacacggtgatcctttgtttcagtttgatgaaaacaggaaactttgcccgtagtatcttcaacgctcactaagaaagggggaattggcaatggcatttgtatcagtacctaaagacttaaccaaggtcaaaaataagatcatcttcaacctgaccaaacggcagctgatctgttttgggattgcggcggcagtgggagtaccattttatttctttaccagagggatcatcggttccagtaatgcagcgacagggatgtgccttttgatgcttccggcatttttatttgccatgtatgaaaaggatggacttccgttagaaaaggttttgaaaaatatgatcaccgtgaaatttatccgtcctccggtacggaagtatcagatggaaaatctgtatgagaagaaatttatcatggtcagaaaaaagaagggaggacagaagagtgttaaaaagaaaaaacgatagacagccaccgcagagattggaagaagaacgttatccaaatgattactggctggatgaagaggatggtggagaagatattccagatccggcggtcagcagtaagccggtaagcggcagactgcacagtgagccaatggtaacaggctatgaagcattggaaagacagagaggggtacgccgaccaaacagaaagctgacccgcagggaaaagaaggctttgaaaagggcacagaaatatgaagcgaaacttcataaagagcatgaaaaagcggataagaaaaatgcgaaaaaagaagcgaagtttgcggcaaaagcagagaaacaagcaatgcgtgaagcaaagaaaaatgcaaagaagaaaaagagcagttcagctacagcaccgccgagacagcagacagaagggaagaaggtttcgggaggaaaaggtggtaccacagaaaagaaagtggcaaatgctgccaaagataaacggattacagcacagcagtccattccttatcatgagatggggagagatggtatctgcagggtgcaggataaattttattccaagaccatccgtttttatgacatcaactaccagttggctcagaatgaggataaaaatgcgatctttgaaaactggtgtgacttcttaaattattttgacagcacgattcattttcagctttcctttatcaatcagcacagcaacatggcggagtatgaaaaggttatccatatcaatccgcaggaggatgagtttgatgatctgcgtatggagtttgcacagatgcttaataatcagctggcgaaaggaaataatggtctgatgcgtaccaagtatatcacgtttggtattgaagcagagaatatccgggaagcacgaccgaagctggaacgtatcgagtcggatattatgaataacttcaagattcttggagtgacagcttatcctctgaatggaacggaaaggctacagatcatgtacgagacatttaatcaggatagtaaagtccctttccatttttcttatgatgaggtacttcggacaggtcttagtacaaaggattatatcgcaccgaccagcttcgtatttaagaatggaaaagactttcagatgggcagaacgataggagccgtttcttatcttcagattcttgccccagagcttacggacaagatgctggcagagtttttggagatggacagtaaccttatggtgaatttccatatccagtccattgaccagatgaaagcgatcaagctggtaaagagcaaggtgaccgatattaaccggatgaagattgaggagcagaaaaaggcagtccgtgccggatatgatatggacattatcccatcagacttaaatacatatggtggagaagccaagagacttctggaagatttacagtccaggaatgagagaatgttccttgtaacggcactgtttttaaatacggcagagacaaagcaggagcttgaaaatgtcgtattccagactgccggtattgcacagaaatataactgtgcattgaaacgtctggattatcagcaggagccggggcttatgagctgcctgccgcttgctatgaatcttgtgcctatcaaaagggcacttaccacaacatctacggcaatctttgttccgtttaccacacaggaattatttatgggtggggaatccatttactatggtttaaatgccctttccaataatctgatcatggcagacagaaagaaactgaaaaacccgaatggtttgattttgggtacaccgggtgccggtaagtcatttgcggcaaagcgagagatcaccaacgcatttatcgtgacaaaagatgacattatcgtgtgtgatccggaaggggagtattatccgttgttccgggcatttcatggacaggttatccgcatttcaccgaccagccatgattatatcaatccgatggacatcaatctggattacgcagatgatgatgacccactttccttaaagtccgattttatcctgtctctttgtgagctggtagttggtgggaagaatggactggagccggtagaaaaaacagttattgaccgttgtgtgcgtctggtgtatcaggacttcctttctgacccagtaccggaaaagatgccgatcttagaggatttatataatcttctccgtgagcagaaggaacaggaggcacagcgtcttgcgactgcactggaaatctacgtcaatggttctctgaaagtattcaatcacagaaccaacgtggaactgagtaaccgcatggtatgtttcgacatcaaagacttgggaaaacagctgaaaaagcttgggatgctgatcgttcaggatcaggtatggaacagggtgacgattaaccgttcagcgaataagagtaccagatactatattgatgagttccatctgcttttaaaagaagagcagacagctgcgtacagtgtggagatctggaagcggttccgtaaatggggcggtattccgacaggtatcacacagaacgtaaaagatctgcttgccagccgtgagatagaaaatatctttgaaaattctgactttatcctgatgttaaaccaggcatccggtgacaggcagattcttgcaaagcagctgaacatttcaccacatcagctttcttatgttaccaacagtggagaaggtgagggactggtcttttatggcagtaccattatcccgtttaaggataaatttgataattctctgatgctgtatgcgttgatgacttctaagccagatgaggtagagaagcgtaaaaaacttggtatcggagaaagagacgattaaaaaatataaaaaacaaaatagaacaaaagcaggggatgagccgggaaaggatttccggccttttttctgccccaaaaatgaaatggaggatcattacatgagagattatacgaattttgagagatgcaatggggaaccttgctgtgtatttgcagagaggatctgtgcagacaattataaagaacttttagaaagaggaaaggacagtaacggggaggaggtgtttggcgagatgttagatgatctgctgtatttagcggaactgattgactttatggggattacctcctgcttggctgcaagaagaacattgagtgaaagacttacagataagctgacagattccattgcaggactggcagatgaggtactggaaaaatgggagagctatcaggataaagcagaataacaggtaaacagtaaaggggatggtgagatttgcaggagcatgagtataaggcgagagataaaaccgtccagaagatgagtcgtgatggtcttagagaagagaatcttcggaataaagaagaaaaaaggatcactggacgggacatggatacagaggtttcccgtagtgaaaaaaaggatgaactggatttcagtaagagaaggcgtgagcatatcaatgaaaaaagggaaacagaacatccggagcaaagttccaaaaaaaccagatatagtagagaatctgtactggatgaggagtcagaacaagatatagatggagaactggatggggaacaagtagccgatgaaagcacagctgcaacgaaatccgcatttcgcagtgagagcatccgtggacagccaaggggagaacgggcttatctggaaacggttgcagacagccgggatctccgtaagaaaaagatggtcagagattatgcgtcaaaagaaagacggaaggaaaaggaggcttccgaagaaagcaagacggcaaagagagaagctgcccggtacagggaaacttcagaagtggcagaagagtctctggatggattttcggaggagatcaaaggcaaatcgaagcgggaacgtgtgctgaaagaacagcggaaaaagagttccagattatcgtttggcgatgaaagtgatggcatggtacatggagccggtatcggtatccgaagttctgcatctgccgtgaaagatgctgtggctacggcagctcattggaaaacccatgaggcagaagaggataatgctgcggtagaaggggcacaccgggcagagcttgcaggagaaagccttgcaagaaaatccatttatacaagggaacgcttaaagcaaaggagggaacagtcaaaaagactgaaagaaagcgttcttgatgaagcagaaaaaagcaggctgatgtttgaatctgtttatggaaatgaagcaaaaaatatggtgaagaaggaagcggagcagaaaagaaaatctgcattgcaaaagctgttccagaagaaacgttatcagaaacagtatcaggcagcaaagcagagcaaaaaggcaaaggatgcagcgattacttcagcacagaaatttacagagaaagcaaaagatgcagtcaaaatgattgcggcacaaaatcgtgggatttttgctacagttgctatctttggattgatctttgtcttgattgcagcaagttttaccagctgtagtgcatccctgcagggagcttcgtctgccattatttccaccagttattccagtacagatgaggacatttatgccgctgaaaatgcgtaccgggcattagaagaagccttaaacacgcagatcaatcagatggaatccacgcatccggattacgacgaataccggtaccagattgatgagatcggccataatccatatcagctgatctcttatctgacagtaaaatacggtggttttacttatgatgaagtagcagaggagatagagtctattttccgtcagcagtatgggattacgacagattctaccagggagacagttaccgaaacaaagacagtccgggtaggagaatcactgggacaggttgtcaccagtgggtattgtaactgctccatctgctgtgggcagtggagtggaggaccgacagccagcggtgcgatgccgacagccaatcatacgattgctgtagatgcatcgaatccttttgtaccgatgggaacccatgtcgttatgaatggtgtggaatatgtagtagaagataccggagcttttgcaagatatggtgttcagtttgatgtttattatgataaccatgcagcagcttccgcacacgggcaccagacatgggaggcatacatagcagacagcaatggaagccaggaagtgcaggttacgacaacgaaagaagtaaaccgtctggatgtgacgatgacaaaccgcaatctggataccgtattgagaagccgcatgacggaagaagaacaggaaagatacgatgcgtataacaaatattatggaaatcgtgattacctgtttgacttaaacagcatacccaccggaagcggaggctttggttataccataccggcagatgctttatctgatccacagtttgcaaagatgatccgggaagcagagaaatatctgggagttccttatgtctggggtggttattccccaagtggatttgattgttccggatttgtaagctgggttatcaataattgtggaaatggatggaatattggaagatgtactgccgatggacttcgttctcactgttcgcaggtatctccatcggaagcaaaaccgggagacttgatcttcttccagggaacctataacacaagtggagcgagtcatgttggaatctacgttggaaataacatgatgatccattgtggtaagccggtgcaatatacaagtatcgcaagtgcctactggcaggaacattttatggcatttggtcgtctgcattagaggaggtgacaggcagatgaacatgaaattaaaaaagattctggatgatattcagaagacagaggataagatcgcagagctgcaggaacatctgaaacggcagaatacattaaaacaacagatggaagatgtggagatcatcaaatctttccgttcgatgaaactgggcagccgggagttactggtactgcttgacgggattcagaaaggaaccgttacgattcagatgaatgaggacggcggtatcacagtggaggataccaaggagacaccccaaaaagaaagcgataacagaccacctgtggggcaggtggcagaaagagaggttttagacgatgaggaataaagtggtaaagaaacttctgataattgctatggcggcaacaatgatttcgggaacgtccattgctactgtttatgcaaatgcaaatccaccggcagaagagacaacgacagcggtggtggaagagacaacaacagaaaagaataaagatacggagaaagcagaggatacgggaagagttaccggagagagtaataattctgctttttctacaccgggaaatgcccagcttgtagatgataaggaaaatgatgatacaaaacagttccttactatccagacgaaaaaggggaatactttttacatggtcattgaccgttccagtaatacagagaacgtatatatgatgtctctggttgatgagaacgatctggcagaatttctggatgaaacagaaaaagacaaggaaactgaagaatcaaccgtagtgatcccggaaaccacaccggagactacaccagcagcagaggaggaaaccaaagtgaagaaagaagagaaaagcggaatgaatgtgaaaggtcttgcagctatcgtagttgcagcaatcttaggctttgcaggaatcgcagtctataagaaacatggacgcagtaaggacgaagattatgtaagtgaacagcttgaattttcagacggtccgtatgtaaatgaagaggacgatgaaaaagaagaataagcgtttttaaaagatggaaacagtaataaggacaggggcagccagaaatcttggctgccttttttggtagaagggaaaggattatgtctaaatttttagtgatcgcagagaagccaagtgtagcacaaagttatgcgaaaaatctgtccgcttataagagggaggacggttatctggagggagaaagctgtattgtcagctggtgcttaggacatctggcagaatacgcacagccagaggaatatgacccgaaatatgaaaaatggcagtttgatgatctgccaatccttccagaagcatggaagctgaaagtttccaaggataaaaagaagcagtttgaagtcataaaaactctgatgaatcgaagtgatgtggagtatctggtcaatggctgtgatgcaggaagagaaggagaactgatctttcaaagggtgtatgtgcttgccggatgcaggaaaccagtgaaacgtctgtggatcagctcgatggaagatgccgccattcagaaaggttttcagacaatgaaaagtgaggaagaatataagaatctctgtatggctgcggtgtgcagggcacaggctgactggctgattggaatgaatggaaccagagcatacaccacgagatattttaaacgattggttgtgggcagggtacagaccccaacccttgccatgcttgcagaacggcaggagaagatcgagcattttcaaaaagaagcgttttataaggtagcactgacagatggaaaacttacagtagtttccgagaacattgcaaatgaagaagctgcggagctgcttgcaacgttatgtaatggttcgaccgctgtggtcacacagatgaagaaagaacgtaagaaatcatttccaccgaaactttatgatctgacaagcctgcagagagaggccaaccgttactttggatatacagcgaaacgtacactggatatgctacaggaattatatgaagaaaagctggttacttatccaagaacagacagtcagtttgtaacggaggatatgaaagattcggtagaggaactggtagaaaaaatgccagtattactttcgtttgtagattatggacagttgggacatggcataaaaagggtaatcaacaatgcaaaggtatctgatcaccatgcgattcttccgacaaaagaagtcgtggagaaaggaattgctgatttaccggcagataaaaagaatctgatgatgctgatctgtcagcagctggtacaggcaactggagaagaatatctgtatgagcagacagatattacggtaaagtgccaggaacatgattttaaagccagagggaagattccagtacagatgggatttaaggaagtagaaaaggcatttaaacagctgtgtgtcaaagcggaaccagtggaggaaaaggaaaaagagacttcgattcctgctgggtatgaagaaggaatgaggctttttccagtaaaagcagagaaaaccacacattatacctctccgccgaaaccattcaatgaagatacgctccttgctgcaatggaaacagccggtaataaggagtttgattctgaaacagaaaagaaagggctggggactccggcaacaagggcaagtatcattgaaaaattggtttcttccggttatgcacagagaaagggtaagaagatattgccaagtaccgagggaaaggaattggtaaaggtcatgccagagtatctgaaatcagcagtaatgacagcggaatgggagaaccagctgttgatgatggaaaagggacagattacagatactcagttcatgggagagattacttctcttgtccgtaagattttagaggtatgcagggagataccggaagaggaacgcaggagattccagaccgcaagggaagtgatcggcaaatgtccggtctgtggttgtgatgttttcgagggcaaacagaatttttactgctcaaaccgtcagtgtgattttgccctttggaaagaaaaccgtttcttgggaagcatggagaaaaatctggataaaaagatggcaagagaacttcttgataaggcttgtacccatgtaaaaggtctgtattctaaaaagaaagatatgaaatttgatgcagatctgttactcacactggaggatggcaagccgagattccatctggaattcccaaagaagaaaaagaaataagacaaggaggtaaagcgatatgtctaaattacaggacatccgggatctggcacaggaacatgcggtatcagtgagcggttcccccagagactggatggattatatggacacagcatcaaggttatatcgttattctttttcagaccagcttctgatccatgcacagcatccggaagcaacggcctgtgcatcactggaattatggaatgaaaagatgttccgatgggtgaaccgtggtgcaaggggaatcgccctgcttgatgaaacagggcagcataccagactccgttatgtgtttgatatttcggatacccacatggtagccgggggcagaagcccgtatctttggcagatgcaggaacaccagagagaagagatcctcacccatctggcagaggtctatgctctggaagaaaaggatacagcaactttgcaggatgcattgatggcagtcgcaagggaaatggtcagtgataatctggaggaatacctggacggattggaatatgctgtagaaggtacttatctggaagatctggacgaggtgacgatccgcagtgatttccgtcagttggcaacagacagtgtttactatctgctttccaggcgatgcgggcttgatccgatggaacttctggaagaagaggacttcatgcatatcacagattataaccgtctgtcagttctcacctttcttggaaatacggcaagccagctcagtgagagtattctgattgatattggaaagaccgtacataaaatttctctggaagaagcgagaaaagaggttgaaaattccaatgaaaggaattataataactttaccacgttaatgcgtgaaactaaaaaccgggatgcagaaacgaaaaaacaagaaaatattgaaaatgaaggaggaaccgattatggaactgacatatcatcgcaagggagattacctgtttccgaatctgaccgtcgaagaggaagaagtgacgatcgggaaatacgggatgctgcggaggacatttctgaaggaacacaagaacagcctttatcagagcctgttcctgaccgggaagctgaacagccatctggaacagatcgagaaagcagcacaggagagaatggacagccagatggagaaattactggagaagaatccggcaccggacaaggaagcagatccgatggcatggacagcacacatgaacgcactgatggcaacagcggaagagagcatcttgacggaattggtatacagttagtcgaagatacaagagaagatggatttagtaaagcagaggaagagatcgcctctgctttatctttgcccgaatatccaactgcagatgaacaaaggcggaacatcgaggaaagggcagctgccctttatgcaggagaaatcccgattccagaggaagttgttgatgagatcttacggacaggaggaaaccggaaagcaagccagctccggatcatctataatttcatgagcgaacagacaccggaggaatatacggagtttgtaaagcgtgaataccgtaaaggtggaaaaggctttcagattgatggaaaggaatattcagtctggtttgatgaaaccgggatgcagatcgcagtggggcatacggtcacagaccagattttagataaggcatttttatcatgggaagatgtcagcggacgtatccatcagcttttaaatcagggagaatatgccccgcagtcggtattggatgcggcaagggacaacgcattgaaggaacacgcacaggcacttgcttatatgaaaggggatatggcagaaggggtggcagagattgtctttgatgaagcagatttgccacatcttcacagtatctatccggaaatcacggattatctggaagaaaaattggaagattcccagtggctttcggaactaaatgaaagactggatgcactggcagaagcctatgaggaaaatcattccattatgcgtttccatcattataatcctgtaaatatctcaaagcagtttcagaagtttgcggatgagatcatcccttatcaggcaagggatgggtttgcctggaaagaacatccgatgttcattacacaggatgagattgatgcttatcttgcaggaggtggagcgtattcacagggcaggctcaggacgtattccttttatctgctgcatgaggatgaaagagcgaggacaggttttatcaaggaacagtatgggattggtggaagcagtcatgcactgtctggtgccgatgattcacatgcaaactatgatggaaaaggattgtttcttgcaagaggtgcttatgggaatccatatacgtcaattttattatcttggaataaagttgcaaacagagtagcttatctgatcaagaatgaccagttcctgcaggcagaagattatgctcgtatgccggaatatgaacgggaacagatggcgaacaaggtactccgcttttatgaccgtcttccggaagagatagacagaccatttacggatgatttcttctgggaaaaaccagggaaagaaatggtggcagttttagagaatccagagcagacagaagaactgttacagaagatggatgcagcattggcagttctgccattagattttgaggcatatgggacaaactaccagcagaaaacagaacttctttcagaacttcaccagtatgcagaaggaacctatacgattttcccgacaccggaagtagaaccgtcttttgtggaaccatccgggcaccagatgaccatgtttgatttcttagatacgaaggcagtgacagaaccgaccgtagtagatatgtcagatgtagaggaaatagaagaggaagaggtaacagctaaaaccgcagaagaattggcggagtcctgggatgaaggtgtttttgcgtatcaggggtatcattttgaagcagtaggggtattgccggaaggaatagaaggaaaagatctggttgcacagacccgttccaatacagaactgcatttatcaacctaccatacagaagatttcccaaagtattcgtatgatgatttttatgcagtcagcaatgcaccgactgccgatgtgttccggtgcctggaaaccggacgcaattatattcccggagaaaatgaactgtttggatatgagggagaattccagccatatttaaaaccggaagtagaaaagattgtaacagaaccgcataattttcggattcaggataatgaccttggggcaggcggtccgaaggcaaagtataaggcaaatatggaagccatctatttgttacagactttggagaaagaagaacgtctggcaacacccgaagaacaggaaatcttatcccgttatgttggttggggcggtatcccacaggcatttgaggaaaataacagcagctgggcgaatgagtatctggagttaaagaataccttatcaccagaagaatacagtgcagcaagggcatcgaccttaaatgctttttatacgtccccaaccgtgatccgaagtatgtatgaagcactggaaaatatgggactgaaacagggaaatattttggaaccgtcctgtggtgtcggtaactttatgggactaatccctgagagtatgagcaaagccaatatgtatggtgtggaactcgacccggtttcgggcaggatcgcaaaacagctttaccagaaaaataagattgccgtacagggatttgaagaaaccagttatccggacagctttttcgactgtgtgataggcaatgttccatttggagcgtatcaggtcagtgaccgcagatatgaccggtatcattttatgatccatgattattttattgcaaaatcccttgatctggtgcgtccgggcggcgtagtggcagtagtaacttccagtggaacgatggataagcagaatccggcagtgagacagtatatcgcaaaccgggcagaactgcttggagccatccgattaccgaataatgcgttccagagaaatgccaataccagtgttgtttctgatattctgtttttccagaaaagggacagggcatccattgaggaaccggaatggttaaatttaaaggaaacaccggaaggctattcagtcaatgcttattttgcagagcatccggaaatggtgcttggtgagtttactacagaaagtacccagtatggaaagcaggaagtgaccgtaaaaccaaaagaaggaattaccttagaagaacagttaaaagaagctatcaggaatatccatggcacaatcacggaactggaactttcggatacagagctggaggaggatgttgtctttataccggcagacccggatgtaaagaatttcagttttaccgtagtgaatgatgaagtctattaccgggaaaattctgtgatgaaccgcatggagcttccggcaatgacagcggaacgtgtcaaagggatggtgaagatccgtgatgttacgaatgaactgatccagtgtcagatggaagagggaagcgatgaacagatcacaaagctgcagggaaaactcaatgaagaatacgatacctttacagcaaaatatggtcttatcagcagcaatgccaataagagggcatttagtcaggacagcagctattgtcttttgacttctctggaatttctggatgataagggggaactgaaacggaaagcggatatttttaccaaaaggacaatccgccgggcagaaacggtaacttccgtggatactgccagtgaagcacttgcggtttccattggtgagagggcaggcattgacctttcctatatggcacagctttctgggaaaacagaagcagagcttaccgaagaactggcaggggtgatctttaagaatccgatcagtgaaaaatgggagccgtcggacgaatatctttctggaaatgtgagagagaaactgcagattgccaaacagtttgcagaagatcacccggaatatcaggtgaacgtgcagtatttggagcaggtacagccaaaagatctggatgcgtcagagattgaggcaagacttggggcaacctggatctccgaggattacattacacggtttatggcagagacattccatacaccaagatattatgtagggagcaaggtcaaagtccagtatgccgaagtgaccggacagtggaatgttatgggaaagaatgtggacagctacggaaatgctcttgtcacttccacttatggaacacagagagccaatgcctaccgtcttttggaagatgctttaaaccttagggataccaagatttatgacacggtacaggatgccgatggagaacaccgggaattaaaccggaaggaaacgatgctggcacagcagaagcaggaactgatcaaagaggaatttaaggagtggatatttaaagacctgcaccgacgggaagatctctgtaagatctataatgaacgatttaacagcatccgtccacgggaatatgatggaagccatattcagtttgccggcatgaacccggagatcaccctgatgccgcaccagaaaaacgcagtggctcatgtgctgtatggaaataatacgttactggctcattgcgtaggagcaggaaagacgttccagatgatcgcagctggtatggaatcaaaacggctgggactctcacagaagaatctttatgttgtgccaaaccatctgaccgagcagtggggcagtgatttcctacgtctctatccgggagcaaatatcctggtggcaacgaagaaggactttgagccggcaaaccgaaaacgtttctgttcccgtattgcgacaggggattatgatgccgtgatcatcggccatacgcagtttgagaaaatccccctttcaaaagaacggcagattgctatgctggaagatcagattgcagatattacgttctccattgaagaagcagcacatcaggcagggcagaattataccatcaagcagttggaaaaaacaaaaaagagtctgcaggcgaggatgaagaaactcaatgaccagaccagaaaggatgatgtagtaacttttgagcagttaggcgtagaccggctgtttgtggatgaaagccattcatttaaaaatcttttcctatatacaaagatgagaaatgtggcgggtatctcacagacggatgcacagaaaagttcggatatgtttatgaaatgccggtacatggatgaactgaccggcggcagaggaatcacctttgctacaggtactcccgtatcaaacagtatgacggagctttacactatcatgcgttatctccagtatgatacactcatgcgtatgggtatgggacactttgattcctgggcggcaacgttcggggagacagtaaccgcaatcgaattatcaccggaaggaacgggctatcgtgcaaaaacacggtttgcccgttttttcaatcttccggagctgatctccatttttaaggaagctgcggatattcagacttcggatatgctgaaccttcccgtaccggaagcagagtttatcaatgaagtcttgaagccaagtgaagaacagcaggatatggtagcagcattttcagaacgtgcagaatcagtaagggcaggaatggtaaatcctacagaggacaatatgctcaagattaccaacgatggaagaaagtgtgcgttagaccaaaggcttttgaatgaactccttccggatgccgaaaaaagcaaggtcaatacctgtgtggaaaatgctttccaggtatgggaggaaggaaaagcagaccggacaacccagctgatcttctgtgacttgtccacaccaaaaggagacgggactttcaatgtatatgatgatgtccggaacaaactgacagaaaaaggaatcccgaaagaagagattgcttttatccatgaatataacacggaggcaaagaaagcggagctgtttgcaaaggtgcgggccggacaggtgagaatccttatgggttccactccaaaactcggtgctggtaccaacgtacaggacaggctcattgccctccatcaccttgattgtccgtggaaaccgtctgatctggaacagcaggaaggacgtattttaaggcagggaaaccagaatgacaaagtaaagatattccggtatgtgacggagaacacttttgatgcgtatatgtggcagattttggagaataagcagaagttcatcagccagatcatgaccagtaaatccccggtcagggcttgtgaagatgtggatgatacggcactgtcctatgcagagatcaaggcacttgccacaggcaatccgtacattaaagaaaaaatggatctggatgtgcaggtgagtaagctgaaactcttaaaggcaaaccacaccagtcagatttaccgtctggaatccgatattgcaaagaatttcccggtacagatcagtgcattgaaagagcggattgccgggatgcaggtggattcgcaggtagtaaaaagcgtggatttacaggataatgacacgtttgccatgacggtagggaatgtcctttatgaagataagaaagaagcaggagaggcattgatcgccgcttgtgcagggttaaaaactgtcagtaccggcggaaaggttggggaatatcatgggtttgcgttatctgcttcctacaatatgttctccaatgcgtttgaactgacgatcaaaggaaaatgctcttataagctggagatcggaaaagaccctgtaggaaatatgcagcgtatccataacacgctttcttctatcgacaggaagctgacggaaagtgagcagaaattggaaactgtacaacagcagcttgctactgcacaggaagaggtaaagaaaccattcccgaaagaagcagaactgaatgaaaagatggaacggttatccgagttaaatgccctgctgaacatggatgaaaagggcaatgagacgattatggcggatgaagatattggcagagaaggaagcagcacagacagcagggatgccgtagaagaaaaagaacttccggaaacagcagacagaatccataagccatctattctggaacgcttaaagcaggagaaggcacagcagaatacagcggaacagaccgttacacagaaggctgcaaagaaaaaacacgaacaggagttataaaagatttcccgtcagagttttctctggcggggacataaaatggagggtttgtttatggcaaataatatagaaaaacagttaaaagaaatatcggaacggctggagcagggagtaaaggaaatctttacatcggagcgatataccgaatatctgaataccatgtcaaagttccacaattacagttttaataacacgctgctgatcaccatgcagaaaccggaagcaacactggtggcagggtatcaggcatggcagaagaaatttaaccgtcatgtaaaacgtggagagaaaggaatccagattattgcaccgacaccagtaagagaaaaacaggagattgaaaagattgacccggatacacaggaaccaatcattggtgaagatggacaaccagaaacagagatagtggaaatgattatcccaagatttcgggtagcgacagtgtttgatgtcagccagacagaaggagaaccgatcgcagaactggaggtgccggagcttaccggaagtgtacagttttatgataccttcatgcaggcattgcagaatatttctcctgtgccgatccgcatgatgaatgtggaaggggatgcaaaaggctattatcaccagacagaaaaatatattgcgataaaggaagatatgagtaatgtccagacgatgaaaaccggagtccatgaagtgagccacgcattgctgcatgaccgggaagtaatggatgcggaaggagtcttaaaagaccagacaacaaaggaagtggaagcagaaagtattgcttacatagtctgcaaccattttggtctggatacttcagaatattcgtttacctatatcgccagctggtgcgagagcagggatatgaaggcgttgaaagcatcaatggataccatccgaaaaacatcggcagagatcatcgggaacattgaggagcagatgcatgaaattgagatggaaagaccaatcagagaaacatttcatagagaggatgtaatcctgcatctttcaggcagtatgggttcggaatatagttataatctggtagagaatatgacagcagaacaggtgcaagagaatgtaagggaatatgttactttactggaacagaaagaattttcagaggatgagaaaccactggaagaatttttggaggacagaggtgcaacgatcacagtattgtatgcaagtgatggagtgggagagaattatccgattgacttctttgatgtagcgtatgatgctgatacaggcattgcttatttttcagagctgacaccgaaagaacaggcagagatgctggtggaaaaagcagaatttccgagaacaatttttacagaagaagagaaagcatttgtaacggaatacgcagaaacattttccggacaggtagaaagactgaatgatctggtctgggatatgcggggatcttatgatgaagccggtacaaacttagtacatgaagtgatccaggcagcaagagcaaactttccaaccaaagagtttccagaagaaagagaaagtaccatgcagtatgcccatagactgattgaagctgcagaaaccgccagtcatgagaattttacggaatcccaaaggaaccttatcgtaaattttgcttataagatggatgaccgggatgaagttttgggactggtaaaccgtatgctgacagcgaatcggggtgaccgaagtgaagttatgagaagtcttgtgcatgaaacagaggcacagatggataactttccagatggaaggattggttttacagaaatgcacgaagcaggaatccgactggagcatatgtatcctcttgaaaaaaacagggcagtagaattgtatcgtgagggtgcggaagtttttctcttacatggaaatccagacaatccagagcaggcaggacagattcttgcagaaacagaaaatgcgatcctggggcatgacggtatttttggtattacggaaacggaatgggaagtacataaagaaagagaagcagcgatagccagacaggaaaaactggaacaggatagtgcagaaaagattgatgaaaccttacttcttcatggagaaagcggtcgttttgcaatctatcagatggatacgggtggagagcatacttatcagtttatgggttttgaatcggctcaaaaattaggctatagcattgatggaaaagactacaggatggtgtatgcggctccatggacaccaacgatcacattagatgatatttttgagagatttaatatcaaccgcccaaacgattttcatggacattccttatcggtaagcgatgtcatagttataaaccggacggcggaaacaaaggcttattatgtggattctttcggctttgaggaacttccggactttgtacagcagagaatggagatactggaaaataatcataccagagcctacccgccagtctataaaggaacacttgctcaggcaatggaagaacgggatgtagatgtctatctggattccagaaagttaaacattgattgtaagaaagcaatcgaggaagcaatcgcattaaaatttgacgggctgcatttagaggaagatgccgcaacgcaagtgttagagcagtttggagaagagcgtatgacatttattatggcaaatacgctccgggaactttcttatgacggcagattttccagacagaacaaagactgggcagagcatatcgagatcccggaaaatatcaatcagggaaagaatctgaatcaggattatgtgatagaaagccacccagcggtgttagatggatttattgatatggcaagggcagagatccgtatgcagaagattgaacaggcattggatgaagcggaagtcaccattacagcagataccagaggatttgaagcagatggacatacgggaacctggcatacagtagatgaaagagagtatgcaggggagaagtttttcttcatggaacatgatgagtatggttcagatgtggcagggattatcgtatcggaacatggtcagcttgtcgcagaagatctctggaatgggtatgatgcaggagcattggaagctatttcagaatatctgcaggagaaagggatttctgtagagggacttatgccggaactggagccggatgaactggcatataagattgacgataggtattttgcaatccagagaacagaggaaggctatgattataccttttatgctttggattatgatgagatcgacggcggtgcctatgataatcctgatatttctatgcgtcaggcaatggaagatattttggaagatggagatatgtccctggaaaatgcagttcccgttgattatgagaatttgatggcagaagtggaagaagcaggcgaacggcagatgcagctggcacagttattaaagaattgtccaccaagtatttttgaggactatgaccgggaaagagcagtggatacctgtgagggaattgcaatgcagtttaccaagagcaaagggtatctgaccgtacaggcaacggaagaaggctatttttatattttttatgattctgacctgcacgaaatccattccaatgattatgacgatccaaaagtatctgttcagaaagctacttatgaaatcctgaaaagtgaaagaatggatgatatggaatgtatcaaagtggactataaagaatttgaggcaatgaccatccaacattccaaagacttactgcaggcaggtgaacttcgtgcgacttctgagattggaagagatgaggttgcattaaatggtcttagcagggcagaagtggaacggggtgtcttgtatcatgcacagggtattctggaagatatgggattagaaaatgaagtagagctgcttgcagcaagggtgcatggttccagaagcagggaggaactttacagagatgattctgatcttgatgtagtgctttcttatcgtggcaatatccgggaggacagtttcttcaatgaattaaaggctcatggtatcgcaatggcaggtattaaggtggacatcaatcctatcgcagaagaaagaatcactctggcagaatatatgaaagagtcagaagcctatcttgatcagaaggaaatcgaaaagctggcggctgatttagataatttcagctatgaatatgacacttacgaatataaagataccgttgagaacagggaagaacaggtggagaaaatcacagaggacattctgaatcagaaaacagggtgtttaaaggactggctggttgaagtatcggaagaatctgatatagacagtgatgtgataactgcccgttcactgctttcccgtctggaaaatgcagaaaccctttctatctttaccagacaaccagaacaggaacagccagaagctacgattactttttatgtggcagagtgcatggagttcccggtcatgggggagtaccataataatcttactctggaagaagcgattaagatttatgaaagtattccggcagatcgactgcatggaggcaaagggattggatttgacctgcaggacggggataaggattattccggggaatatgaactgatgtgttgggacagagtagacagggaactgatagatatgattccacattataaagaaagtccattggtacagaaagcaatcaacgatatggaaaagtatctgaatgagaaacatggaaaagtgcaggaaacagaacaggctgtggaagtgaaacaggaagttccagaagcaccagtcaagaaagaatccgtatcagtagaaccgaaccagacgcaaaagaaagagcctgtaaagggcgaaaaaggagaactgaaaaaatccgtgctgcagtcgttgaaagagtttcaggcaagggcaaaagcacaggagcagaaaaacaaagaagcagaaaaacccaaagcacataagaagggggatgtagaattatgatggatctggcaatgaactttgatacagatgaatgtttagtgaccgcaatgtttgataaaggcaacagaaatgatacgatggaagccatcgacaatatcattccatttctgaaaggggatgcggatatgatcgggctggtctgcaataccataagaaagctgttctgcatgagtgacgaaggctatgagatttttcttatggatctggaagattataaagcggaactggaagaggaggacgaggaatgagtacaagtcaatgtgcagtatatcaggtaaaagaaacaccagagtaccgggatgttcgtttccgttcttatgagaagctgagaagcgaaggaaagagcgtcagcattgagaactatcagcaggtgtatattggaagaatccagccgggggaaactccggcggatataaaaatacgcctgcagaaacagcggccgaagaactttaaaggtcattccatcggatgcagcgatgttctggtaatcacggacgagggaaaaaccacagcttactatattaataaagacggattcatcatcgttccagaatttcttacaatcaaaagttcctctgataccagactttccattgatacaaccggatatgaaattgaaggaaagaaagggacttggcttgcccaggattatattttgatgaacgagaagaaatggttcctgatggaacatgaagagtatgggacgagagccgcctatgtgattctcagtgaagatggtgcagtagttatgaatgattgttacaatggttttgacgaagaagcaagacggaacattcagaactttatgcagcaacaggcagcaaaagaacaggaacagcaaagacaacagcaggtgcaatcgcaaatgcaaccgaatcagacacaacagccaccagaacagcagaaaaagaaaccagagctggcaaactggcagaagatcatggacaacggagaatatcttcgcagtgcggagatggcagaagaagccaactacaacatgatcgacggactgatgaacaatactacaaagaaaaaagataaaaatgttccccggagatcagtgttgaaacggcttcgcaagcatcagcagaagatagccagtcagggaaaaggacaaccacagcaacaaagagcagtggaagaagagatggaaaggaagaagaagtaattttcaacggaagtggtcttgttactcatgtggcagggccatttttgttgaaaaaagtaatagatgaattataatataattggaaacttaaaattgaaaattacagtgttgcagtaatgaggataaaatatgaatctgaataatttatataattttaaaaatgcagtgagacattttgtggatattgtttctttggagtaccctgatgatgttgagaattttaataccagagaattgtgttggacaatgccaatttcatttaatgtacaaaagggaaatggaaaatatagaactttgaaaattcctaatgttcttaactttgtgcgggcatttcattattactcaggtttaccttattttgataatgtccaggggattaatccagcacatagtagaatgacggttaattttgacacaggggattttgtggcaggcgaatatgatgcacaattaaatgatgactttatgaatctgtgcttgtatgataatttgattaaacttgatattaaagacttttatgggaagttatattcgcattatcttcctaaaggtgaattgcaggacaatgttttcaccagtttaaataatggaagaactggtggaataataatgggcaattacttgtcactttattttgcagaaaatgctctgaaaaaaatatcagatgattttgaaatggcattagaggatgcatctgttaattgtcattttgaatatttttcagatgatttctatattttctgcaatagatatgacaatgaaaaaataaggaaacttttcagtcaagtattagctgagaatgattatgagggaaatgagcagaagatagaaatagaggattatgaatcgtataatatagaaaatctgctgaccagatattggaaagctattatgagacactggaatgtagaagttattaaggactttgaaaggcaagaacagatcggagcaagaatacaacataaattatcttttttgaatcagttgatatatagattggcaagtgtaaaaaaggaaagaaataaacagtctttaataagaaattttttcaaaaccaagcatttccgagaaacagattttgaagaatatgatattgaagagtatgactatcatcagctgtgtttcttattaaaaacttcgccagagtcattgttatatacatcagatattttcaatgatatgggtggatttgataatcaaaaaattaaaatctttttgaaagccagatataaagaagcattaatttcagcatttcatgatgtgcagttgtattactattacgcaatcaggtgttatcatttggatgagtgtttggaagatacagcggaaatggtacttaaatctcagaatcaaattttgatttcatattatttaaaggatggattattttcagaagaccagattaatagcttgaaacttttagataatgaaaaattttggtttcagaattatcatttgatattatatacgccaggcttgagatcagatttagatgagagtatcacaaaatacttaatgccacagagagcgaacactgatttgcgacaaaggagatacagggatttttataagaaaaatttgacacttgggaaagctattatcaatgaaatctcagtcgttaccgagaatatagaagattatttagaaaagagacaccaggaacttatagaggaataattggtttacatattagaagtcgagagggaaagtaattgataacgatatacgatgaacttaaaatagcatatggaaatcattttgaggatttgttttctaaattaatgaaacaaaaatatggtcttagataccaagcaataagcacttctggaagaactggtgacatgagtgttgatggagtattggattatagcgttgcctttgctgtgtatgcaccggaagtttataaagaaaaaaatgcaatttggaaacttagatcagattttaatggttttatggagcagagaaaaaatggtcagtggggaagtattaaaacatattattttgttattaaaagagaaagaacaggaattactccgttagtagagaatctgattatttctttcaatagagactttccagtgtgggtaatgacaatggaagatttgaagggaatgtcagaagggtatttacccttttcagaagatggatatttactggaagaatttaaaacggatgtgactaatataatggaatatataatagatacagatttttcggctgagccatttgacgttaaattggtagatgggatttcttttatattagagaaatggaaaaagaaaaaatactcttttaaaaaccaagatttggaaatgttaaaaaaagagatttatatgaacttagtggaactggtacagtatttttcttctgtttatatgcatgacatagaaaatgggatgttgatgtttaataacgattcaatagaagctggcaataggttaagagagacgttaagacctgaaacacttcggatacggaagaaaatatggaaattgttagagaatctatattcatacaaacagctataaaattataatagaaaagtaattgacatattcatggtggcaagttaatataatattaacaacaggcaacatgagtgtctgtcaagcgttgaagtaaggtgttgtgccagaaggcagtgccttaccagctttataagggtttagcatttaccacaatctggctagagggcaaaagctctcaaaagaaaatgctggaggctctgccaagtgcagggcctttcttaattttgttatgaaataaagggagttgcgaaaaatatagatgagaacagtagttgattgtgtatcatcatttattcctctcttatcaatagagtatgaaattgttctgggaagaaaaaatgttgcggttaaacttataataacgtttgataaaaaagactgttttcatttgatggggttacaatatctcacggatagaccagagttaagacgtgatagaggaaaaatatttgatgaaattcagaacggtattataaaaagagaaaatatagagtcttcggatttttatcataaaatacaagacagagtacatttcctgccgctacttgaggaaatgctggatagtaatgatactatttttaagtataataaaaaggcgaatgtctattcaatgatagaagcggattatctgatgaagaatcatatggaagggaaaaatttatttttgtttttatctaatgcaagagatgatagttatttttgtcgttctttttttccagaggagaaaatggattatacaaagaatcaagcttcatggactctcttatataagaaaaaaagaaaccttattgatgggtcagaacatgtattatacgacagattgaaaaagatgtaaaatagcaagattgcctgatggaaaatatttatcccatcaggcaatcatatgtaaacatttttatagttctgattattctgcagattcttcagaaacagaatctttcttttttctggatttaccagaaatcattttatgaccagaatagatagccataatcatacagagaagagagctgcaagcaaaatatttgtgagctgttttcatgtttttatagccggtataaaaggttccaatcatggttgccaatgcaccaagtgaccaatatttatgtgctttcatttgaatacctcctgcgtttttctataataatacctctttttggaaagtatgaaaacagggaaatttataaattctgctctttctcaatctgctgttcctgctcgtgactctttccaaggatcatatcaatattagcagacacggtacgaagctcccgttcataatcccggcggctagaaaaatcttcccgttgtgtatctcgcacttcaataagccggtctttttcagcatagagggctttcatggaaggcagcttatttccgacagatttttctttcagtgtccggagagctgtatcataaagggaaagttctgcccggtgttcttcgtagaatttatccttattgcggctcttacggtagtctgcatatacgtttttgtatgcaaggtactgtccggtaaaatgtatttgttcgttcacatctttaagctgctgttctgtatcctttaaagattttctggcagcactggtctgatcagatgcctggtcaagtgccgtatggaaatcttcaagagagccatatccatgttcctggatataggcaaccgtctgagccatctgtttcagattggagagtttgactttttgggaatatgcttcactctgctgtgctttgatacaggtctgtaaatctatcacaagtcggagatctgattttatgaaaatgaacggtacaggaatatcggaagcatcaggagaaagtgctgtctgcaaatctttcacagtgtttggaacttgtggttcttcaattttcattttcctgtcagagagtgattttgcattttccttaaatgcctgtaatagaaaatcctcttcatatcgtgttccgagatttcgtccagtgatatatttttttctgcctggatgaagatagctgtaccggtttctgctgatcttgaagatgatatgatattttttatcgaggatttgtgcaaactcttctggtgacttggcggtgcttgcagcatcatcaatagcatcccggagaaactgtttctctgtctgatagcgagtctcttttggagtgatgccgtcttcaagcattttctggttgagcttatcaagtttttcctgtccacgacgctgtgcccagtattctttttctgtaatttttctttcagcaggagagagcagatcaacttgatgcagaccttctttctggcacatatccatgacatcttgctttaagtaagcaaggtaggcggtgcttaggtggtgtttatatccggcttttgattcgcagtcaaattccatatagggttcttggggtacgtcatatttccgaaggctgttgatcacaatatgcacatggatattgccgctttcattatgaccgtctgtatgagtacaaactaaagcctgatgaccaggaaagttcttctttgcaaaagtcagtccaagctgttgtgcccgttcaccagtcagtccacattcctctctgtcttttgggtcaaagctgataatgtaatgatgagacttgatctcattgaaatttttatttttatggtagtagctgtttagttcctgacattcagatgcaaaagtaaacggatcacagttcagaccatccaggtaatattcatctcgtaatatcatatgcccctcatcatcgaggattggcttttgggtgtattcattatgctgaaagatgagataccgttcggattctccatagtcagcatttttgtttgcgatatgtttaatcactgccacggaaatcacctgccattctcatcacttcatatttcatttcataaatatcccggagagatttttttatttctgttctcatttctgaggagataattccaccttgattaaaatatcgggcaatctgattgaggttgcctcctatttttccaaattcaccaatcagcttttttatttctttgacatctgcagtaatttcatatttgataataacattctgcttatccaaagcattgcgtataaaatcagaaacagtcatgttggatgcagtggctctttcaaaaagaatctcatattctgtttcgctcatacgcaggtgaacgtctttggtcttggtaagtgattcatcttttttgggtcttgtcattcaatgctcctttctgcataaaggctccgcacgggaaagagaaaattttacagcttgctgtgaaaacaagtgatgaggaatcatcacgctgtgaccatggcaatgggaaccaatacgcatatctttgattgcggtcgagggtatggggaaacgaaatccccatcaagttgcaagtggccagtaaccctggaaggggttattgtgctacattgcgaaacttgctctaagagagaatcctttcccataatcatgcgtgggagacatcaaaaagacaggtaaaaatgtaaaaaaataaaaaaagtgaaaattcatctgacattttgccctctgccagctgtgattagtagaaaaagagagatcacaggaggtagccagatgaaaaatatagaaatgcctacactggaagaattgcaggaaatggcagcagtggacatccgtaccgtagataaaagtacgttagcagagctggatgatgtggagattcatgaagaattaccgcaggcagaaaggattgcagattatatcaagcagattaaaaatccgtattgctataaatcacatggggtagttgtgaagatcagctttgcaggaaaatgctctctggaagaaagcctgagcagatgtatctccatgtaaaaggaaaatcgtccagaaaaaaataatcgaaaaaagaaagaaaaaggtatggtagtaatccagaagttatgttaatatggatgtgggtcaaaatttaaaagcattcaaggagccgtgaatttcttggtttacaccgccacagagcgagtaaagtaggaggttgatggctttatgtatttcaatcaaaagtctattttagcagcggattatctccggttatccagagaggatggagacaaactggagagtgacagtatccgcaatcaaagaagtctcattaacgattttgtaaaacagcacaaagagatccagctggtcgaggaatatatcgacgatggatacagtggaacgaactttgaccgtccggcattccaaaggatgcttgaggatgtgaaaaggaagaagatcaactgtatcatcgtaaaagatttatccagattaggaagaaactacattgaaacaggaaggtatctggaaaagatctttccatttatgggtgtacggttcatcgcaatcacagaccattatgacagtgctacaggatcggatgatgcagatcagatcattgttccgtttaagaatcttatcaatgatgcttattgcagggacatctcaattaaaatccgaagtcagttagatgtgaaaagaaaaaacgggcagtttattggcaactttgcagcctatggatacttaaaagatccagaagataagaaccatcttattgttgatgaatatgcggcagatattgtacggcttatttttaatctgaaaatagatgggtacagttcacaaagaatagcagcccagttaaatgaaatgggagttttgccgccattggaatataagagaagccgggggatgaattataacagcggattccgttccggttctgatcctaaatgggcagtcacttccatcaaccgtattttgcagaatgaactttacataggcacaatggttcagggcaaaaaccgaaagattaattataaggtgaagaaaagttctcctattgcaagagaaaactggatacgagtagaaaatacacatgaagcaatcattccagaagagagttttcaatatgtacaaagtctgttggaaatagatacccggatcgctccgaaaagaaaatctgtttatttgttttctggatttgtacgttgtggggactgtggtgagaacatggtcaagcgaagcacaacgaagaaaggaaaaaaatactgttattatcattgctccacttataagaacaaagagggatgcagttcccatctgatcagtgaaaaaatgatttatgatgtagttctggattctgtaaaaaagcagatcgcattattgaccgaagtagaagagatcatcaagaaaaatggaatggatacttacaagaaagtggagagccggtctttagaacagcagttaatggcactttatgaggaagtggaaagatataaagacttaaaggcgagattgtatcaggatatggtagacggtattgtcagcagagaagagtaccatgaatataatcagagattcacagagaagatgcagaaagcagaaaaggcgaaacaggaagcggaagagaagaaagaaaagttatctgcggaagaaaaacggatgcatccatggatagaggatttcaaaaaatataaaaatatccaaagccttgaccggaaagcagttgttacattgatagagcagatcattgtatacagcaaggagcagattgaaattcagttcaagtatagtgacgagatgcaggaaatgatagaagcagtgcagatcatacgtgagcggcaggaacggaaaggagaatttgtatgcggtgcgtaagttataccagaacgacttcctgtaaagaggacggaaagattccggcggatattataaaacagcaggaccagcatatacaggaatacttgaaaaaacagggatggacattatctgcaaagtattgcgacagaaaaaaagatacagaagagaacacagtttttgaagaactgacaaaagatgggatcaaccgcaaatttgatatggtagttgtagacagcattgatagatgcggaaggacaatatcctgtgcagatgatgtcttagtaaaaacatttgtcccggcaggaatacattttgcagttgtacaggacgaatttatcagcattggaaaaacgaaagaagaattatatgaatatataaagaaagctaggtatgcggcagttcagttaaaaggcatgagagagtatgcagtcagagaacagttggagggactttataccgtgcatgatgaaaagtatggatacattctttctgatgaccgcagggaattgcttattgatgaagaagcggcagttgttgtgcgggagatctttcagatggtattagatggtatgccgattgcaaatatagtgaaaattttaaatgacagtggaatagaatctccgatggtgcataatgcacgagtcggtcataaggtatggccgacatatgacaataaatggttattctgctctgtaaagagaatccttagatgcacagcgtatgctggttactggcaaaagacaatcaacaaaaaaatttgtacacttcctatagctcctattttggaagaaggcatgtttgaaaaagtgcaggagattctcgataagagaaagaagccaagaaaaacaagaccaggtaaaaatggattatttgtaaaaaagatatttgatgccgagacaggaagaaaaatatcacagagaaattttaaaacaggggaaacggtttttctttttgcaagtgggacaaatcagcttccaagagataaaagtacctacatttcttttgaaatcgtgattgctgaagtaagaaaagccatacaaagagaaatggaactggcggaacagataaaaaagaaactgtcagccagagaagcagaatcagaaaaatataaatggttgaagcagtattcacaaagagcgtggacaatctttgaagagatggggcaagtggaaaaagagcgtattccattatatcagaactaccagacagaaaaaatcaatgaagaagaatatctggcaggaaaagaagaaatacgggatcagcttcgtatgtatgatggagatttcagtgaacttatgaaagaggtatccgttatagaaaaggcatatagcaataaaaatgaatggttagagacttttaagaaagagaatcttccgaaagaactacagccagagcatatcaataaatggattgagaaagtattgataagagattttaaagaagtgcaggtatgtttatccaagcaggaatggaaaaaatactttccatcagaatggatggaggaatagggatggcaagaaagagcagaaaaaacagaaacgtagaatctaatatacaaacggttgtcaaaaaagaaaacttactggatacggctgcgtatattcgtctgtctgttgaaaacggaggaaatgaaacggatgaaacattagttgtgcagcagatgcttgtagaaagatttatagaagagcatccggatctgagactggaagaggtatacattgataatggatttacaggtacaaattttgaacgtcccggatttatgagattaatggaagatgttcgttctggaaaggtgcaatgtatcgttgtaaaagatttatccagattcggcagagactatctggaaacaggctattacctggagactatattgccaaagttaaatgtacgctttattgcgattacggatgattatgatagctccagaaaagaggacagggaaaatataagtgttcccatcaaaaacatggtaaatgccatgtatgcaaaggatatgtctaaaaaaatcctggcggcaaaggaagcacaaaagcggaacggaaatattacgttatctaaggttgcatttggttatgtccgttctgaggataaaacaagacaggtcgtagatgaaacggttgccccggttgtgcgtatgatattccaatggacattgctgggagtcagtaaaagagaaattgctgacaggctgaacctgttgggaattgcgacacccggacagaaagaaaaaagaaagatagcaagagtgccacttgaggagacaaagtggaatggaggaactgtcagaaaaatattagaaaatccaacctatacaggagatattgtcacaggaaaattgaaacaatctttgtacaaaggagtgaaacagtatcgtacagtaccagaagagtgggatgtgcagaaagatatgcatactccgctggttgcgagggatgattatgaggaattgcaggaaagcagagaagagattcataaggtaacgaagaaacgccagtccagatgtatgaaggacagagaaaagtatcaggatagtttttcgggaatggtccgatgtggcgagtgtgggaacgttatgtatttcagacgatatactcataattatacaaccaatgaaaaaatgggaagcgattactattgtgggaatgaacaatgttccagaaatttgatagaaggaaacttactcaagatccttgtgatggatcagatccagattttgatcaagagtatgtgtgacagaaaattgcttttgcagaaaatgaaaagtgcaacaaaagaaaacaatattttttataaagcagcggcaaaggtaaggacattggagcgtaagatcgcacagacggaagaacgcaatacaagactatatgaagattatgtagcaggtgttgtggataaagatgattttgatatgatgaaggaacgctatataggggaactccaaaatctccgggaagagcttcaggtacaagaacagaatcaaaggatcttggaaaagaaagcaaaccgatatatggatatggtaaatcatatggaaaaatatctggataaaagagaatataatgaggcacttgtacaagaactggtggaatatatagaagtatatgcaaatgggagtattcatgtgtgcttcaaatgtaaggatgaattccagcagatagcagaagaaatggaaggtgttcagattggctaatggattgtatttaagactctctatagcagatggagatttagggaaagaaaataaagatgaaagcaacagcattgacaaccagagatcacttcttgtcaattttatcactgacagagaggacatgagtgatgaatacatagaatatgtggatgatgggtattccggaacgaattttgaacgtccggcatttaagaaaatgatagaagatgcgaaggtaggaaaaatagataccgtcattgtaaaagacttttcacgatttgggagagattatattggagttggagattatctggagcaagtgttcccactcctgggaatccgctttatttcattaaacaataattatgacagtaaagagtacataggaagaacgatgggattagatatggcaatcaataatcttgtcaacaatctttacagcaaggatatatccaaaaagttaaagagtgccttgaaggtgaaatggaagaatggaaaatggacaggctcgaaacctccatttggttatttaaaagatgaagagcatggatgctggaaaatagatccggtagcaggtaaatatgtccgtatgatatttgataaagcgatggaaggctgcaatacttctcagatctgctattacatgaacgagcagaaggtgccgacacctggaaaatataatcagatgaacggattgctgcggcaggggaattataaaatgccagataaggaagttgtttgggataccggaatgatccgtacaattcttggaagatttgagtacacaggtgctttagttatgggaaggcggcatacagtagcggttggaagtaaagtaacaagaaagacagcagaacgagatgtcgttatccgaaagaatatcaatccaccaatcattacggaagaagagtatgaagtggcaagtgcatctattatgtttatgacaaagccagaatatcgtggtgcgaaagacttccttctgaaaggaaaagtgcggtgtggaaactgccacaggtcattagcttatacagatggcggtattcatccgaaagtatattgtccccataaagctcaggcaggaagatattctcattgttctgaagatgcgtatccggtatctgtgatagaggggcatatttggtattccttaaaaaggatactaaggatattggattcagtgcaaagagaatccgaagaaaaatatacggataatagttttacagggaaaaaacaacaaagggtgttggaattggaactagaaaaattaaaaaatgaacgtatccatcagtatgaagcttatgcagaaggtgtacttagcagagaaaaatatataacagtgaagaaacagctgacagaaaaaatcgaaaagatacaatccgaacaaaaagcacttgccagtgtgatcattgaagaagaacgatacagaagccggataagaacagcagtccaacagttggaggtacagatagaaagaggaaagctgacgaaagagattatagatacaatgattgataccgtgtatgtgtatgataaaaaacggattgaagtaattttaagatttgatgatgttttacaaaaggtgatctcagaatatatggaaggggcgaagggtgcatgacatttaaaaattttatgtataaaggggtattgatgatagctgtgctggcattgatcggatggcttggaaagtatctgtatctggtagatggagaaattgactggttccggctgatgctggtatatggtgttccggtaggaatcccatatatgtttttcatcattcctgcaaggtgggatttatctggaacgataggaatggtagctttgtgtgcgataatcggagctgtatttggttttattattgcgattggaattgcaatcagggcagtatggtatgtaatcgcatttccaataagctgtttgctgcgaaaggagaaaagcaggatatgagtacaggcgaaaatattaaaagaatccggaagtttagaggaatgacacagaaagaacttggaattgcgattggaatcggagaagaaagtgcaagtccaagaatggcacaatatgaaactgacaatagaacaccgagaaaggaaatgctgcataaaatggcagtagtccttgatgtagatccgagaaacatttccattccgacaggctatagggaagaagatatgatatataggcttcttgtgctggaagattactttccagaaatgaaactggagaggaacggaaggacaggcgaggtcgtgatcaatctgcagaataagaaaatcaatgaattcctttatcagtggggaactattagaggaaagaaaaagcagggaatgatttccgaagatgaatatatgcagtggaaatattgcagaaatcatgcgtaatattatatattatatatcatatatgtgaattcacagataaaggatgaaacagcactgggaaaacttatgcatgattttgcctgtacaaatacgaaagatatgtattatgaagtcctggctgaccgtgtgcattattttaaagaagatgagaaaggggtggcggtaatgtgtaaagcgatggaaaatatgagaaatgaaagcagtccatatagcccgtttaatgctggatggtggcaaactcagttatgaagatattgcagcatacacagagctaaccatagaggaagtcgaaaagatagcttcagagaagaaaagtgcataattgtaaggcagtttaataccgatacagcttagaaaatagaaaccgcaggaattttcacctgcggtttttctctgccctgctatatacagaaataccgccatagaaatattgctatactatgacggtattacaaatctttttcatctttgaaagcgaacacatcattgggtgtacagttaagaatattgcacagtttttcaacggtaaggattgtaatgttctgatttttccgaagctgatcgagggtatgtttgtcaattcctttgttaatcagggcatattgggaaatgtggcgttgtttcatggtttcccataatggactataatcaatcaaggtatccccgcctttctttgctttttggcataaaataccattaatttcaattataattgtcgaataaaataaaaaatatggtggacatattcaccataagagatataatttgattgagggacatgtaaaataaaggaaaataaagtcggataatgtaagaattgattgatgggtgcatgtgggaggagagttatataagtgaatattgaaaagttttactatgatgaacagacagaaatgtatgagcagatgaagaaggaacaggatgagcatgaacagtcactttcggtagaggaaagggaaaaagaacatcaaaaattattccaggaagcaagaacaattatggaaaaagcagagcgtaaaaagaaagaagaatatcagatcatcaatcctgtaaaatatcagaggtttatatatctgtcagaacgggcaatacagttttcaaaaatctcaggatgtaatattaagattcagacatttccagacatgtctgcacttattaaaatgcagacgggatatatctggttgctgagtgatggtgaatcagcactggaagataaggaaacaatgaagaatctgttaaatgaagcggactgggtaggtattggcagcagaaaacatggagaaaaagatgttgttgaattggagttttggtttgaactggcagaaaagttaaaaaagtaaatgaagatgaaatgactattccacatatatcattactgtgataaaatgtgagaaaatatatcaacatataaaaaacggaggagagagagttatgttcgataccattcatcatattgcaatcattggaagtgattatgaaaaatcaaaacatttttatgtggatctgcttggacttaaggtgatcagagaaaattatcgaaaagaacgtgacgattacaagattgatctggcatgtggaccgcaggaaatagaacttttcatcataaaaaatgctccagctcgtgtaaattatccggaagcattgggattacgccatctggcatttaaagtggagagtgtagatgatacggtaaaagaattgaatgggaaaggaattgaaacagagccggtacgcctggatgattataccggaaagaaaatgacatttttccatgatccagatggacttccattggaaattcatgagtagaaaatagcataggatagaaagagacagatgcaggtaatgaaatattcccacatctgtctttttttgtgcaaagatttatttatcggaatgtcgcagacagctttttataaaggcagcagcttttatcatttgttctttttcttcatcagagcagtcagaggataattcaaaccaagtctgatcagcagaagaaagagaaagtgcaggtttaccggaatctgcagataaagcaggactgtcagtatggatactgctattgtcatctaataatctgttctggatttctgatagagctttttcacgatattgagcatccatgtcctggatactttcaacagaagcatggtaattgcctaatatgtgattgatgtatccatttttaaaatgaagaaaaagagcatcttcagatagatccgctaaatcctttgaggttgcaatttctaaatctgcctgtccctccattttaaacagaatagaaaacagatcggatacagactgaatttcaaaatccataaagagatttacactgatacctaacgcatcagcaatttttgaaagctgttcatatttcggattacgttcattggcttcgtacttgcggagtgtactgaaactgatctcagcgtcctgtgcaagttgttcctgtgtcatgttacgagccagacgaaaatacttgattatttctcctgtattcataggcaaagtcctccaatagcaaaagtataccatattctttaataaaagtgccacaaaagttttgaaaaaaatattgacaggtacaaatgtgacatatataataataacagatacaaaagtaacacataacttacacaacagacacaaaagtacaagtaaacttatacataactgtcataagaaatatgaaaaaagatgcagaaagtcaaacggtttgaagttaagtaacagttaagtataagatgatcaggaaaggatggaatagaatatggcagaaattattatgggaattgatcatggaaacggaaatatgaaaggggtacatgtaaactttccatgtggtctggtaagatatacttctgaaccaggacgatttatgaatgaggatattctggaatataacggtgtatattatacgttatcagaaacaaggatgccatttaaagcggataagacagtggatgaagattactttatattgaccttattttcacttgctctggaagcaaaggaaagaggaatcactttatccggcaaagatattgtgctgggagttggattgccaccagcagactttgggcagcaggctccgggattcaaaaaatattttatggaacactcaaaacatggaatttctttccgattcaatggaaagccagtaaattgttacctgaaagatgttttggtaagtccccagaattttgcggcagtcatgtgctataaagcaagcctgttccgccagtaccggacggtcaactgtattgatattggagacggaaccgtagatttactggtaatccgaaaaggacagccggatttgtcagttcgtgtcagtgacagatcaggaatggcaattttacgctcagagatttctaattccattcagcagaattacggtattcatctggagtcctcagatgtagagcaggtattaatgcaggaagcaacgattctggatgaagaagtggtaaaagagattcagaaaatggcaggagactggatgcagagaattatcaataaactccatgcgtatgtaccagatttccgaactaatccggcagtatttcttggtggaggcagcttgcttctgaaacagcagattgaaaaatcttctgattttaaatatatagagtttatcgaggacatccgggcaaatgcggtaggatatgagaaaatgacagcattacacatccagaaaagacagggggtgtaatgtgtgggagagatacgggttgtactgatatttaatgaagataatgaacggcagagagaaatcggaaggtatctgaaatcacagaaaaggtgcaaaacagcactgattacagaactggtttatgcgtggttgcataaagaaaatgcacctgtttcttcctataataatgcaaatgtcagtgtagaggaattaaagcagcagttgttgcaggatacagattttatacagcagataaaaaagagtgtagttgttgaaggagataccggggaagtaatggaagaaaggcagagtgatggactggatatggatgaagggatgctgatggcagggctgtcgatgtttgaaaatggattttagaagataccgctgaacaagggaaaaagaatgttcagcggtattttcttgcataatgtggtaaaatctatatgggattaataagagtagttggaggatgatatatgagttatttattgtttgaaatcaaagataacaaggatgaactacatagagtggtggtgcgggatataggtacaattttaaccataaatgatgaatttgtgacaaaacagataatggtaaggaaaggtatagaaaaaattaaatattgttcgattaaacctaatgttgaaaatttgacattatcaattagggattatactttaacagacacaatatatatagaaagtttctgtgatgttagatcagatattagtatattgcaatctatgggaactaatattcatatgacagaacaaaaaattcaacatatgcaggtagattgtgcaagtgtttttgcggctaactgcagcgtagaaaaaatggagatcggtattttttcggttgtaaatcagtataaggatttgagtgatacgaaagacaatattgcttataaaatggataaattggaattacgagatgtgaatatagatatattagatttatatccagaaagtaaaaatattattatccagagaagtagaataaatgagtttaataataatggcaatatgttgaaaaacattacatctacggtatactggttatatatatggcaaaacacatatattgggaaattgtctattggaaatagaatagaaaaaatgaaaatagaggatacttccattgataaagtagttgcacgagcaaaactttatgttgatactttggaaataaaagattcaaacattgaaaatgcatatggatttgagaaaaaacaatttaaaaatttaacatttgatatatggaaatggattggaaaatctgcggataataatagaaatgtgcgtgaacgggcagaagcaaactatcaaatggctaaattattatataaaacagaaaaaggatcagataaggtcatgagttctttatttgatttttgtgctggatatggatataagccttttagaattataagaacatcaggtatcatggtattgataaatacatttatgttttcatttatgaaatttgtagaaatactttcaaagatgtggtctattccacttaatggagaatcattttgcaaaggagcaattattgtttggaattattttctgatttctattgctgctttagcgggacaaaacagttttgagctgagagatggattaccatattggctgtcagtcattgaatatttattaggggttgttttatttgcgatgtttgttaatgcgttatatgcgagatataaagaataggtgacagaaattcagagtgcagatttttctgcactcttatcatttttaataatatgatttcatggatgattctaaaaagatcatattagggattctatttgagataaaaaagtagaagatttttgaatacaacttgaactgtcctcaatgtcaagatgacatacagtataatcagctatccaacgtttctgttttacatatttaaagttatccagaaaagtatcggcaaaaatatgttgatcaacgacaagattttctaattgttgctctaaaaatctatggctggcagatacgtttaactggtctggttcccaattatctaataattcattactttccaataaggcttttactgcatgcatcatagaataatagcatcgtgaaattgcgatattatatgaatgtgcttcatgaagttgccttgcagcatcgagattttctttggaagtagttatctcataaattagattaacaacaggttttattagagaaatttctaattcagttgctaaagcagaagtgtctgaatgaatttcttctgctccctcgattaaacgattgtaaatcatttgtcgttcatccttggcaatagttgtatctccaagaattgcatgaagtatatgaatgagattatcagaagtatttccacgtaaattataaaaactgtcaaaaataggcagatatgaaatgatttctccctcacgtttatttttccataaagcattaactagagcaattcttttataaaattcatgttcaaaatagtcgttaaacgatgaataaagagttctatcatctccaaacataaaaccaattaaggtaaacattaagctactacgaaaggcagttaataaagattgtttttgaacatctgattcacttttccaagcacctaaataaattgatgtatcaccaaaatcaaaaagattgattatatcagtatataaaggttttaatagatcaacagctatataatcccaagtgtctacacgtatttgaggaatagcgtcttcgagcaatgaaaatttggtctggtcttcaacagtagaaagttgtattccaaagtgttgaagccaacttgaaggattgctcagaggttgagatattcgaggagtatccgttaaaaataagtgaaataattttaaataatcttcatctgaaaaatgctctttattagcatattttcggaataaatatttttcatcaggatcagaaagagcttgtaaatacaataggtttgctcctttgggcaaatctatcgaatttggagttggggaatcaatatgtattgtcattactcgtggaaaaatatacggattgattgaatattttgtcataagaaacctcctatctaagaacgcaaggaagcaagaacgcaatgtagtataacaagaacgcagagacatgaaaatctctgcgttcttgctattttccaggtttataattacgcagtgctgccttggttgattttattatttccagcagaaattccttttcctgcttggaacagtcacttgtcagttcttttatatcagcatcaaattgtgaaatgagtaccggtgtgttgtcatagagcagctgatctaccgtggtatcaagaatttgtgctatgctgagtaaggtagaaaggctgagcttggtatgtccgttttctatggtactgatataggtcggtgtaacgtcaatcatatttgaaagggtttcctgggtcatcttttttgcgagtcgagcagaacggattcgtttcccgattgcaatgtaatcaatatctacttccaaattgtcacctcccaaactttaactgaatgttgatattttgcggaaactttaactgataattgatatttcttattgtattcccaaataagttatattataattaagtataactagaagtttaacttaaaagtatatttatactagaagaataggcggttagataaatttgaaatgggataattcattcaatggaattgaatattattccaatgtgaaatcttcgagtgttgaatggatatggtatccgtatattccatgtggaaaaatcacagtgttgcagggagatccgggtgagggaaagtcaactttgattcttcacatagcagcaatattaacgaaaggtgctaatttgccagatggaaataaaataaaaaaaccaatgacggtaatttatcagtgttctgaggatagtaaagcagacacgataaaaccaaggttagaaaacgctggtgcagattgccggagggtagcatttatcaaggatgataatggagatttgacactggatgatgaacgtatagaacttgctgtaaaaactactggagcaaaattgctggttttagatcctatacaggcttttataggtaagaatggaaatatgcaaagtgctgttaggatgagagaaactatgacaaagttagcgaatattgcagaggaatatgcatgtgcgattgttttagttggacatatgactaagagcaatagtgggaagagcatatatagagggcttggaagtattgatatagcggcagcagcgagaagcgtactgttggttgctagagataaggatgaaccatacaaaagatatatgcttccaattaagtcaagtcttgctccagagggtgaaccgatagcttttgcattgaatcgggacaatggtttttcttggattggtaagtgtgaaataaatataaatgaattggcagtggggcagagggtttctgctaaaaaagatatagcgattaactatttgcatactatgctggcggaaagcgatatggcaagtgtgaaaatctttgaagagatggacagatatggtttttccaaaagaacagtgcaggaagcaaagaaagaagcgggtatccaggcatataaaaagggaaatgcatggtattggcacatggagaggagtgcagcagatgacggaacaggaaagacatgctgtaagccaggaagaacggaaggagaagatccgggcgagatataggggagtagatcgcaacgaattggagtttattccggcaaagcagaaagaaaagttgtttgaagatacgggaacaaagagagtttgtgcctattgccgtgtttcgactgatgatgttaatcagacttcttcttatgagctgcagaagaatcattatgaggatatgattaaagaacatcagggatgggaactggtaggaatttatgcggatgagggaatatctggtacgtccttaaagcatagagatgagttcaatcggatgatagaagactgtaaagcaggaaaaatagatctgattgtaactaaaagtgtttccagatttgccagaaacatagtggactgcattgcgaaagttcgtgaacttgcaaatatgataccgcaagtaggtgtattttttgaaacggagcatatctatactttggataataccagtgaaatgatgctggcagtattatccgcagctgcacaggaagagtctcatacgaaaagtgagattatgaatatttccatagagcagcgtttttcaagagggatattccttacaccaaaattattgggatatgatgtggatgaggatggtaatctggtaattaataaagaagaggcagaaacagtgcgtttatgctattatttgtttcttaacggttttccaactgcggaaattgcagaaatactgatgcaattaaagcggaaaacgaaactaggaaatactaaatggtcaagtggtactgtgggaagtttattgagaaatgagagatattgtggagatgtactttccagaaagacatttacgcctaattatcttgatcataaatcaaaaaagaatcgccatgatcggaaccagtaccgacaaacagatcaccatgaggctattgttgacagagatatttataatgcggcacagaagatgttgacagtaacaaagtatgcgaaaaaaggctttccatttcctaatctcaaggtagtagatggtggagcgttaaaaggttttgtgtcggttaatcggtcttggacaggatttacagtagaagattataaaaaagcaagtcagagcgtgtattctgatcagaatagtatacaagatgaagaatcaagagaagaaaagaaagacggaggatttgatttatctggatacgagattgttcgggcacagttcttttctacaaggttgaatccagccatgacaatctcagaaggacgtattacctttaatactgcctgtttgaagaaatttgaagatgtggaatatgtagaaattctttttaattcaatagaaagatgtattgccgtaagaccatgcgataaggataacatcaatgccgtaaaatggggaacgatacgaaatggtaaatgggcagtcctgcctaaaagctgccggggattttcagaaccactatttgaattaatggactggaataatgagtgtaaatatcgttttagaggtcaatattcaaaggaagataacgaacagatcttattgtttgacctggaagaaccagaagtgattaaacatgagataattcaagaggatttaccggacacaaatacgactgaagcagaagagaataccgtagaaacatctgaaaataaaacaaagaagattgtcagaacacttttcccgaagcagtggcagaatcattttggcgatagcccggaagaggttgttcttttacatagagttaagtattgtgaaaattgggatgtgctgcgtccagctaaaatagtagaaggtttggaacctatatcagaaaatttattggataagctgaatgaagaagcacagaacatgatagaaaagatgaggtgtgcagtatgagtgaaatgatgataaatcaaactattgagaatacagaaaacatagatcagaaggcactggaactggcacaggattttagttatgatggttaccaggttgtaagaagggaactttttgcacatttacgggagccagccgttgtaatccgaagagatagtgtgacatttaatactgcctgcattgccggtttagaggatgcagtttacatacagattcttgttaaccaggataataagcgaatggtagtgcggaaatgcgaagaaaacgacaaagatgctttgagatggtgtattgaaaaacctgataagagaaaaagtagaaaaatgtcaaataaattattttcagcaatgatgtatgacatgatgggatggaatacagactgccgatataagattttggggcataaaataacacatgaagatgaaactatgtatatttttgatttgttagaaacagagatattcatggatacaaaaagaaagaaaaaagcaaatccagattcagtggagaaaaaggaagaattagttactgcagaaacagatcagacaccggagcagaatcaggaagagatagcagcaaaagtggcgagaaagttgaatagaataccattttatcctaaagattggaaggattcttttggcttatcagtagaagaacataaaaaggcactggaaactaatttaacagacggctatatagaattttcagcaacaaggtgataggagaaagtgcgctcatttggaagggaggagtgcagatgccgaaaaccacagcaaatatcacagcaaatatcacaggggtatctctgtgccaaaaaaaaggaataatacgaatatttcgatcaacgataaaagaattgggtgatccgaggtatattcgcttcttatttaatccggagaaaagaactttagcagttcagtctgtcagccgaaaagaagcggagtgttttcgtgtgcctaaatataatcctaaagactgggattttataatttgcagtattcaaatgctgaggataatctggagagtttgtgagtggaatgaaaatgacacgtatcgaatagcaggaacgcattatccagaatataatctggtggaatttaatttgaatcaggctaggatagtgcaatttggagaaatagagtagacatagaatcgaagaatttgggacttctgagaaatcaggggttctttttttgtgcttattttgagggtaagttgataatactgtgctttatgagatatttttgaaaaaaagttgttcctgagttgacataaggaggtgatatgagcatcgtaggagtccgagatataatagggacaaccaaggaaaaaccgcagttttcagcggctttcgctatgtagagttctctcggatgtccgttatttgttgcaagtgagttctgatacatggtcggagatcgttgaaaatagtagactctttggatgctcattttgacccaatcttacgagcaacaaaactgataaggaggattcgacatagcctgtgtacccattgatacatgggctaggagtcatggagaagaacattgaaacaagaaacaaagatagaatggcctgcccttgcatattttgtgcttttcttttataataaaacccacgcgacatggtacgggaaacgattgttataccgatatcccgtggcaaaatacctcgcaggatccgatacaaacaacatcagcggatccggaaagcaaaggagaaaatattatggcacagaacgtactggcagtggtagccggacaccagatcaccgaagaagaactgcaggcatttatcggacacctgccgaaggagcagcaggcatatgcatccaatccacagtttaaagaacactgcaaagaacagctgatcactttccatgcactggcaaaatgcggagaagatgagaagcttgatgagactgaagaatataaaaaaggaatggaaaatgcaagacaggatatcctggtacagatggtattaaaagagactatcgagagtgtcagtgtatctgatgaggaagtgaaagattactatgaacagaacaaagcacagtttgtaaaaggagctacggtaaatgcaaagcatattctgaccgattccgaagagaaatgtgcagctattctggaatccatcgtgaacggagaaaagacttttgaagaagcggcaaaagaatcttccacctgcccatccggtgcacagggcggtgacctgggtgaattcggaaaaggccagatggtgaaagaattcgaagacgcagccttccaggcagaaccgggacatgtggtaggaccggtaaaaactcagtttggttatcatctgatcaaggttgagaagaaaaacgaagccaaagaagccggatttgctgaagtaaaggatccgatccgtgcagaacttctgaagagaaaacaggaccaggcatacctggcgaaagtgaaagaactgaaagagaaatatgtacagaaataatccgataaatttcagtctgcagaaagattcgtcaacctgttaaaaaagcgttctatgaagaaagaaaattgttatattttcattatttctttttcataaatgtatagtataataagcgtgactgaaaaaggcttttcgtgagctgcgagtcccagtttgcggaaatgatttttcagacacgctctagacagatgatgtcagaacaacagaaaaaagggcagggaagaaagacgaatgaagagtaaaaaaaagtcaaaaaaaatatatatcatcctgctggttgtctgcctgcttgttatggcgggactggtagcaggattgtttggttatgcacactatatgggaacaaaaaccatgggaagccggatcaagatttttggagaggatgtatccggacgcagtgtggaagagacggcagggatgctggcagatgattttaagaaagtaccggttacttttcaggaaaacggggaaacggattatcagaccacactcggtgatcttggttacagcatcaacgaaaaacagctgaaacaggatctggaaacactgagagacaaacgctggaaagaaggcggcttcttcccgaaacaggaaggtcttacggtagcttatcaggtagaacgaaacgatgagacattttctgcggcactgacggaggaacactttcagctttccacagaccgtgtggattcaaccgatgcatacgtggaatataacagcgaccagagtgcttatgtgatagtcccggagacactgggtaatcatatggatcaggcagctgtggaagcatatgtggaggaacagatccgcccgcagatcgaaggggattttccgaaaacaggactgaacgtggaaattacatcagatctctaccggaaagcagctgttacacaggatgctcaggaattacaggaaaaagtaaccacgttaaatgctgctttgcaaaagtacaaaggagtttccgtaacgtatacattcggaaaagaaactcaggttctggacaatgcgactatctgttcctggctggtgatttccgatgaaagtgtatccgttgataccgcacaggcgcaggagtatatcaagaatcttgccacaaaatacaatactatctaccggccacgttccttcacgactacaggcggtgaagcgatcaccatcgaaggtaatgaatacggttaccgggttgaccaggaaggagaactgacacagcttctggcagatattgatggtggggcagctgtgacgagagaaccggtatacagtaaatcaggctattccagaaacggaacggatgacctgaacggaagttacatagaagtcagtctggaacagcagcacctgtggctgtacaagaatggggcactggtgacagagactgatatcgtcagtggtcttccgggagaaggaagagaaacataccgtggggcatggccgattgcatacaaagcaagtccgtttaccttaagcagtgatgtgtatggatatgataccacggttacctactggatgccgtttgtttacggacagggacttcacgatgccagctggcagacgagctttggcggagacacctataaaaccaagggaagtcacggatgcatcaatctgccgccggatcaggcgaagattatctatgagacaatcgataaaggatatccgatcctgctgtactgatgtgtggtgacagaattatacgataccagggtcaaaaggtcagaaagctgatgcaagcttgcttgcgagagtgcaaagcacgtaacaatctggtatcaaaggggtcaaaataccttttgaccccaacatcattatgtataaaaagtataaaaaagaacaggcggggattgttttcggacaattcgctcctgttcttttttgttttcagtaaagcaaaaaacgctccgcgaggatgcatactgcggcgtataaggcggatatcacaagcggtctgcgtttcattcctgtcgttgcatattaataattggtccggaggaccaattttgatgccggcagcaaccatcagatgctacacagtgtcatcagatgttccagtgaaaacacctcttcctgatccagcagttcttccagcatattcaggttctgatccgagtgttccagttcccgggagaatcggtagcagacggacaccagctccccgggttccggcttttcccgtttccgggcatagagtcccagcaccagctcttcgatgaagagtgtacagatcaccgccatttttcctttggcaaagattttttcatcatacacagcaccacaaaaatatgtatacagccagtataccagcaactgttctttctgtatctgccattccgggaaagtatcctgaaaatcaaggagaagttccatataggatgtttcttccggacaggtgtgatacaaagaaatcagtgtatcctttaaaaaaccggtccagtccggtgcgagaacctccagttttggaacgatggttttccagatctgtttcatcagatcgacccgatccatatccggaaaacaccgaccggaaatcttctttcgaaaagcagaagagaaaccggactgttcatgtcgtgcgcggatcgtttcccaggaaaaaagttcctgtttattcaccgccagctgaaagtcatgggtgcataccagaagttttgccatccgatatcgtaccggaacactgcgatcctgaagcgcagtgagcagataatctctcgtatccatcagcgcgctgaacagaaagtaatcaaaatcttcataggtttcttcggcagtttctttttcaaaggttcgaaaagcaaccgggtctttttgggagaggatgatccgtgctgcttccggacaggagagggacagggatatttcccgcataccctcgaattcttcgatgtgccgtggatatctgcggcaggtatcacagagcatcctggatcccgcttctatatacatatcacagagattttcttcatttaaaaatgcacagcgatgcccgtactggcggaaggcatgttctttccagttgatatcgttatgcagccgattccggaaagatccctgaaaatggcggtatttgctcaggcttttgtcatcgatcatgatctgccatcccgcacagcaggtatccggacaggcatctgcgatacaggaaaactttttataataagaaggaaatgtaatttgcataaaataaataaactcctttgagatatgattggtgttacagattattattaaatccgataaatattgtagcacagattttatcgattgtaaaaagcctttggctgcggtacaataaaaccattgagtaaaaaacaaaggaaaaataaattatgaataagatacagattattgtaaataacggtgccggtaccggaagtgcagtggcggtatggaaggaaacaaaagaatatttacaggaaaatggaatatcatataacgcatatctgacccgttatgaaaaacatgcagtgaagctggccggacagatctgtggaaagattccggaaggacccatctatctgctggtggtagggggagacggaactatcaatgaagtgctgaatggcattacggattttgaccgtgtccgccttggcgtgattcccacaggatccggcaacgattttgccagaaatctcggaatccttcgggataccagagaagatctgcgggaaatcacagcctgtatcgaccaggaacaaaacggagaaaaactgcagcggatcgatcttgggaaagtaagctgggaagggtgcgagaagccaagaatcttcggtatcagtgcaggtgccggtctggatgcgattgtatgtaagaaggcgttgcattcaaagttgaaaaagattctgaacagatttcacctgggaaagctgacgtatctgatgctgacagttcagactctgttttccatgagaacctttcaggcgaatgtaacgacagacggggaaacagagagttatgaaaatatgatctttgctgcagccatgaatctgagggcagaaggcggcggggttccgatggcaccggaaagtgtaccggatgatggaaagatctctctgagcagtgcgtccggaataccaaaatggaaaacatttttcctgcttccgctgctggcaatgggaaaacagggaagaatccgtggatttgatgtgaaagacggatctgagatcgtgatggaactggatcagccggtggtactgcatgcggatggagaatattgtggggatgtgcagcatatttgctttcattgtatgaaaaatacgttgtggctattacacagatgcacggaaaaataatagtaaggtgacgggtgagaacgaaaaatggataagataatgatgtgggtgatggcaatctgtgccctgatcggcggcgtggatcagcttgcgggaaataaatttggtctgggcagacgattcgaggatgggtttcaacttctcggaccgacggcactttctatggcggggttgatctgtataacaccgttactttcactggggttggaacatacggttgttccgctttacaggatccttcatcttgaccctgggatgctgggtggtgtgctggctattgatatgggcggctatcagctttgtaaagaactggcacaggatccggcaatcggccggtacggtgggattatcgtgggagcaacccttggatgcactattactttcacgatccctgttggaatgggaatgctgggagaacgggaaaaaccattgtttgccaaagggattcttgcaggcttatgcatgcttccagtgggaatcctgacagggggtctgatgtgcggtgtttctctgggaaaactgctttttcagagcattccggttctgattcttgcggttcttctggtttttggaatttcccggtttccggacggaatgatccatgggtttcgggtatttgcaacggtgatccgcagtgcgggtactataggaattgcgcttggagcattttcttatatgacgggtccgcagctgcttcccggcctgactcctctggatgaggcactgaaggtggtttcctcaatcggaatcgttctccttggcagtctgccatttgcggaaattttgcagaggctgttaaagaatccgctggaatggatcggagaaaaaatcggtcttggaaggaacggtacggcaggattgctggtgggaatagtaagcgcactgccggtaatcgcagatatgaagcggatgaacgaaagagaaatcgtcatgaatgcagcccttctggtatgtggcacatctatggtggcggcacatctgggatttgttctcggtgtggatgctccggtgacaggagcacttctggcaggaaaactgaccggagggatcgccggagtctggatggcatggaggatcatgaaataaaagattactgtccactccgtgcccagcaacaataaaagattctgttaatttttttgtgcaatcttttgcttgtcaaatataagaagcttttgtataataaaaacgattgcgagcagaaagaacagaaaggaaagtatatgaaaggtttgtatgatatccacacacatattattcctcatgtggatgatggtgcggatacgattgaaatcacaaaaaagatccttcagatggaatataacgatggagtgcggacgattttcgcaacttcgcattttcgaagaaggatgtttgagacaccgatggaaaagatcaggcagcagtatcttcaggttcagcaggcagcaaaagagattgcaccggatctcaggctcattctgggatgcgagtttcatgccaatctggatatggtagaaactctgaatgcggggaaaagaccaaccatgggagatacgcggtttgtactgacagaattttccgaagcacatgattttcgttttattcaggaaagatgttatgagctgatcagcaacggatatgaaccgatcattgcacatgcagaacgctatccggttatcagaaagaatctggaacatctcgaacagctagtggatatgggcgcatacatacagatgaatgcggacagtatcagcggtgtggaaggctggggtatgaagagattctgtaaaaaggttatgaagcagaacctgctgcattttgtaggcagtgatgcacataatacaggggacagaaaaccccagatgggccgttgtgcccaatatatggagaagactatgggacgggagtatgcagataagattctgatcagaaatccccgtgagatcatagaggaaggaagataggagaaagaatatggaacaaaatcagatgaacaacgatgagatcgagatcgatctgagggagattttctctgtactgctgagtcacctgggaatcattatcctgtccgggcttgtcctgggtctggtggcaatcgtaggaacgaaagtatttatcacccctcagtatcagtccgtaaccaagatgtatgtgctggcaaaacagaacaacgatacactgaccagcgcagatatgcagaccagtaccctgctgacaaaagactatgcagagatgatccagagccgtaccgttacggaagcggtcattgcacagcttggtctggatatgacacatgaacagctggtaaacaagatttccgtatccaatacgacagatacccgtatcattaccatcagtgtactggataaggatccttatatggcaagagacattgccaatgcagtgcgtgatacagccgcagaacatatcaaaaatgttatgaattccgaagcagttaacgttgtagatgaggccaatatcccggctgaaaaatacagtccgagtgtttcaaagaatggtctgatcggtggtgtcctgggatgtatgatcgcagttgccattatcctgatccgctttattatgaatgataccattcagacagcagaggatgtagaacgttatctgcagcttagtactctgggaaccattcctctgttacagacggataaaaagaagaaaaaacgtgcgaaaaaacataaaaggagataaaaagctgtggaaaatgtagaaattaaagtgcaggagatggactacagcggaacagaagcctataagtctctccgtaccaatctccagttttgtggagaagataaaaaagtgatcgcagtaacaagctgtataccaaatgaaggaaaaagcagtgtgaccatgaatctggcagtttccatggcagaagctggaaagaaagtgatcctgatcgatgcggatatgagaaaatctgtactggtgggaagaacaaaagtgagaagttctgtaaaaggactgactcactatctttccaaacaggcacctctgatcgatgtgatctgctccaccaatgtaaagaatctgagcattatatttgccggaccggttccgccaaatcctgcagaactgctgggaagccgtcattttaaagcgatgctggattccctcaaaaaagtatatgattacatattgatcgataccccgcctctgggaagcgttatcgacagcgcgattatcgcggaagaatgtgatggtgcgatgatcgtcatcgaatccggtgtgatcagttatcggtttgcacaggacgtaaagcagcagctggaaaagagtaactgtccgatccttggtgttgttctgaataaagtagatatgtccagacagggctactacggtaaatattatggcaaatactatggaaaatatggaaaatacggcaagtatggacatgaagattaaacagaggaaggcgtggaaaaagaaatgaaaaaaggtatcatagcaattatggtgattctgtgtcttggactgatgggctttgtgggctttatgaagttttcggaagacaatacgccgccggagatccagttccaggataacgagatcgtgtatacagcaggtgacagctatgacggacttctggacggagtgacagcgacagataataaagatggtgatgtgacagaaagcctggttgttgagagcgtatatcccaacgaagacggacagactgctacgattgtatatgttgcaagagactcccgcaacaatgtgggaaaagcaaataaagtagtaacgtatcgtgcggctgcagatgaccaggcagcaacatcagatgccacagagaaaacggcaacagatgagagtgcagatgcacagccttctgcaacaccggaagcgacagatacgccaacttcgactccgtcagtgacaccggatgccggatctgacacagaggaggcaagcgctgacacaacatcagaagatgacagtgaggaagacgattccacagatgatctttcagcggaagctccgaggatcaaactgtcaacgaatcgtgtgacgatcaaaaaaggagagtcgattaaccgtatctcttatgtggaaagtgtaacggatgataaggacagcaaagaaactctgtacaaacggatcgagatttccggagacacattcgataaagacacttcaggcacttatgagcagacgtattacgtcgttgatacggacggaaaccgttccaacgaagcaaaactgacaatcgtggttcagtaacggaactgttgcgatgcgacagtacaaatgaggaaaaattatgaaaaaacattcatcaaagaaaaaagctctgctgattgctcttgcagtgatcgtagttctgatcctgggtgcggtcggagctgtttacggagttacccatggattctacagatccagtaattacacatcggatgaagatgcgatgaaagactttacaaacgtaggggaagatacaactgctgaagatgaagtgaatccggaagatgcaaccggagaagttttatcggacgaagaacaacaggaactggatgcaaaactggccgagtttgccgattcagaaccggttacaaatgacggaaatgtatataacgttttgctggtaggggttgaccgccgtgacaagtcctgggcaggaaactcagacagtatgatcctgatgtctctgaattatgagaaaaagcagatcagcatgatttctctgatgcgtgatacctatgtgaatattcccggtatcggtatgagaaaactgaatgcggcccatgccaatggtgccggtccgctgcttctggaaacagtgacacagaactacaaggttcaggtggatcgttatgtatctgttgattttaacagcatgatcgatatcattgacaagctgggtggtgtggaactgacactttccgatgatgaagtgagagttgccaataattacatcacagagatgtgtaatctgagaaagttggatccaaacagctattactttataaaaggtgggacaaagacctgctccggtatacaggcagtagcctatgcgcgtatccgctatgtcggtaatgccgattatcagcgtaccgaacgtcagagaaccgttctgaccaagatgatggaaaagatcaaggatatgagccttccggaactgtacagttttgctgaagatgttcttccgctggtaactcataacatcccggaagatgagatgtggtctctgcttgcgaagtctccatccctgttacagtacaaactggtaaaagaccgtattccatatgataatatgtataaagttatctatgtgaagaaacaggatatgcttgttccggactgggaacagaccattgcaaaattaaaagaaacattatattaaagattaaaatcgggtggtatcagaatcaggaaagattctggtaccgcttttttgcgttgcataacgagtaaattcgtgaggcatagtttctctcgttgcgttgcatatcaataattggtccggtggatcaattttgatttacgcaagcaacaagcgatattccgttccgatatgtttcgaaagaaatacaatgttttccggaaatttttgttgctatttaagaaaatgatggtatagtagaaaagaacgttattcctgtgtgaaaacgcatcaaccattttgataatatttttaaaaacttggaaacgatgatggtgctgaccatttacaggcggcaactatgcggaggatccatgaaatcttatccgaagctgtatgaatatgcagatgttatacagctgtctgtttgtatgtctgttttttcacaggtatctgatgttcagttttattcccaatattctataattttatgagccgagagacagggaacgtatagctgtattttatggtggtatgccgtttcatcggacagaagaggagaaaaaagaaactatgaacaacacacatgcatcacggacacggtatctggtggaactggcactgatggtgaccattattttcgttatggcatttaccccgctgggatatttccggacacttggattatctattacgtttctgacggtaccggtagcagttggggcgatgattctcggacctttgggcggtgcgatctgcggactggcattcggtatcaccagttttatgcagtgcttcggtatgggtgctttcggaaccatgttattcagcatcaatccgctgggaaccgcagtggtatgtatcgttccgagactcctggaaggatggatcacaggactgatttttaaagcggtccgcggaaaaatgaaaaatggtgcctatctggtggcgagtcttgcctgcccgcttttgaacactctgttttttatgagtacgcttgtgctgattttttatcatacagattatattcagggatttgtgacatctctgggagtgagtaacccatttacctttgttgtggcattcgtcggtgtacagggactgattgaggcgatcgtctgctttatcctggcaggagcaatctcaagagcgctgagtgcggcattacacagaatctaagcaataatcagaggatacaaaaaagaacattttacatgataagaagcatgccggaagatttcgggaaggaagtccggcatgcttcttgtatcaggatttctatttatcaggagagtgagagtaatgaagggaatacgtgaaatagcaataacggatatgccggaggtttccatcggtaatgtccagagtgacgaggcaaaaaccggtgtgactgtacttttatttgataagaagggtgcggttgtcggagtggatatcagtggtggaggaccggcatccagggaaactccgctgacttctccggttacagcggataacccgatcaacgcgatcgttttatccggcggatctgcctatggactggcagcagcagacggtgtgatgcgttgcctggaagaccacggaatcgggtttgagacaggctatgccagggttccgctggtgtgccagtcctgtatctatgacctgggttacggaagtgccactgtccggccggacagtgcaatgggatatgcggcctgcgagaaagcgctggcaggcggcaatccttcctgtggcagtgtgggtgccggaaccggtgctacagtaggtaagatctgtggcatggagcgtgcgatgaaatccggtctcggtatgtatgccgtagagctgggagaacttcggatggcagctgttgtagcggtcaatgcactgggggatatctttgatccatccaccggaaaaaagatcgccggacttcttacggcagatggaacgtcttttggtgacagttgcgaagaactctggaagatggggaggagagagaacctctttaccggcaatacaacgatcggagcggtgttcactaacggaaagttcaataaagcacagatgaacaagatcgcatccatgacaagaaatgcctatgcgcggtgcatcaaccctgtagggaccatggcagacggcgacagtatctacgcggcatccgcaggagatgtggaagcggatctgaatgtggcgggaaccctggcagcatatgtgatggaacgggcgattgtggcagcgatccggtaatattccacgaggcgtttttcgtgagcgaaggtcacagaaaccccgggccatatcgcacgaatctatgcgttttggcttgtatgtctcgggattttgacatattcatgtcaaaacacctcgcgggacagtggctactgaatagttaccgatcagcacagatttggtgtatcgcgcagcgtgatgtctggaacggagtaaacagtaacacagacgggatatcatgcggacataagacgcagagaacagttgacaaccttccataaaacagcgtatactatataagaatatggcgttgctgaggtctctgataaagccggagcctgcagcagcaaaacacgagggaggaaatgaatatgaaaaagaataacagtatcaaaactgtggtagccatcggtatcggcgcggctctgttctttgtgctgggacgttttgtggcgatcccgagcccggttccgaacaccaacatcagtcttcagtatgcagtactggctctgctggctgctatgtacggtccggtagccggtggtctgatcggtttcatcggtcatacactggtggatctgtcctggggtggaatcccgtggtggagctgggtgatcacatctgcatttgtcggtgtggttataggagcattcgccagaaagctgaacgttcaggaaggtgattttggtaaagcaaaagcagcagtatttgcaatcgcaaacgtagttgctcatgtcatcggatgggttgtagtggctccggtactggatattctgatttatgctgaaccggcaaaaaaagtatttgcacagggtgcatttgccgcagtatccaatacgatcaccggtgtggtagtaggtggacttctgatcctggcttacacaaagaccattgccaaaaaaggatctctggatcaggaataaaatcagttgctgattacgaaaaagctttctcataaagtctcagagacttgtgaagaagctttttcttttgtaaatagtaagacgaggtagagaaaaacgtgacaaacaaacaatcccctgttatttcattcaaaaattattcctttcagtatcgtgcccagaaacgaccgactttaacaaatatcaatctggatatctatccgggtgagagagttctgatcgcaggtccctcaggttgcgggaaaagtactctggcgggctgtattaacggactgaatccctgttccaatccgggcgaagccaccggcgaactgatcatcgatggggtggatgccacaaaaagcagtatttttgagctttccgctcatgtgggaacggttctgcaggatccggacggacagtttataggactgactgtaggagaggatatcgcgttttccctggagaatagctgtatgccccaggatgagatgcatcaaatcacgcgaaaagtagcagaactggtaaaaatcaataaccatcttgactatgcaccccatgaactttccggcggacaaaaacaacgggtcagtctcgccggtgttatggtggatcaggtgaagatcctgttatttgatgaaccgcttgccaatctggatccggcaaccggaaaacagacgatcgagctgatcgatgagatccagaaagagaccgacactacggtagtgatcatcgaacatcgtttggaagatgtattatggagagatgtggatcggatcattctggtcagtgaaggaaggatcctggcagatctgcatccggatgagcttctggcaacggatcttcttgctgaaaatgggatccgggagccactgtatctgactgcgatgcgctatgccggaatcacgctgacaccggagaaaaaaccatcccatgcagacagggttgcactgccggaagacgatgtaaaacagttaaagcagtggtttcagtcgcgtatggcaggaaagcaggagtcggagagagagcctcttttggaagtgaaaaacctgagttttggatacacaaaaggacagcggacgcttcaggatgtaagcctgacgatccgaaaaggagagatggtcagcatcgtaggaaagaacggagccgggaaatcaacattttccaaactggtctgtggcttcgaggatccggatcagggagagattcgctttgcagggaaggatctgctgacagaaaatatccgtcacagagcaaaacatatcggctacgtgatgcagaatccaaaccagatgatctccaagaccatgatttttgacgaggtggcactgagtcttcgcaatacaggactggatgaggcgaaggtcagggagcgggtggaagagacactgaagatctgtggcctgtatccgttccgaaactggccgatctcagcactgagtttcggacagaaaaaacgtgtgaccatcgccagtgtcctggtacagaatccggaattgatcattctggatgagccgacggcggggcaggattttcatcattatacagaaattatggaatttttgcgaaaattaaatgaagagggtgtcaccgttgtgatgatcacacacgacatgcatctgatgctggaatacacgccgcgggcacttgtttttgcggacggacggctgatcgctgatgacagtgcagcggcagttttatgtaatcgggagctggttgagagggcggctctgaaggaaaccagtttattcactctggcaaaccgtgcaggtatcacgccgccggaagcttttgtggaatgttttatcgaagaagatcgggaggtgcgcagccatggccgctaatacggtattaaattatctgccaagggaaagtgtagttcacagactcaccggaactaccaagctggcatttttcctgttatttaccttcgccagcatgatcacctacaacacctgggtgcttctgggacttttggcggtgagtatctcagcgttcaaactcagcaagatccgctttaaagaagtccgttttatgatgattttcatgcttgtttttctattgttgaataatttgttcatctttttgttcgacccggatcagggaacaacactgtatggcacccggcatgtactctgccatctgttctggaggtatgatctgacagcggagcagctgttttatatggtaaatatttccatcaaatacttcgtggcactgccggtagcgatcctgtttatctcagcgacgaaccccagtgaattcgctgccagccttaacagcatcggtatctcctacaaagtaggctattccgtggccatcgctctgcgttacatcccggacatccagcgagactaccacagcatcagccaggcacagcaggcgagaggtgtggagcttggaaaaaaagaacactttttcgcaagactgaaaaactctgtcaacatcctgctgccactgatccttacaagcctgaaccgcattgatacgatctcgaatgcgatggaactgaggggattcggaaaacacaaaaagagaacctggtatacaaaaagatccttcgcaagaaatgattttatcgtgctgggactcggagttgtgttgctgggagtgagcctaacggtgacgatcttatttgggagattttataatccgtttgtgtaaagagcataattacaaaaatgctatgataactgaaagagcattacagtcagttatcatagcatttttattttgtataaatggcgacaagaaatatccagatgtgaaacagaaatatagggttgaattaatttgagcagtaaaattataaaagaagtcgcttaactttcccttaagcgacttctctgttgcgttagatatcaatgattgatccggtggattactcttgatttatcccgatatttcttaaaacattatcaattttatcatttttcattataatggtcaagttagtgcttttatttttaaataatctattcataaaattttcacgtaattacgtttcgtttttcgccaatagtgacaaaaagcagtataagccgtcaaaatcatcgtcatttctgtctcacttttagtatataatctgagcaaaaaggagtagacacagatggccagaaaaggagaaaacatttataagcgaaaagatggcagatgggaggcacgatatgaaaaaggcagaaattccaagggacagattatctacggctctttgtatggaaaatcatatcgggaagtgagggagaagaaaatcaatagtatcgtaaaacttcctgtagcaaagaccatttcgccgtcagaatctatgaatatctgcgatgtcagcaccaggtggctggaatcgatccggcacacggtaaaagaaagcacatacagttgctacctgacactgattcaaaaacacattcttacttattttaacaataatttaataatcacatccgaacatatccagcaattcattaattacaaaatcacaaatgatctctctccagccagtgtgaggaatattgtggttttgctggaacgtatccttcgctatggagaagacgaaaacctgctgccggttaccaagcgttctttcacttttccgaaaagttccttctatataaatgatactctggatgcaagtcaattatccattcttgcaaggtatctttatctggagggagatgcattctctgttggacttttgctttgcatgcacaccggcatccggatcggagaactgtgtggtctgaaagggggagattttaactttactaacgaaacctttgagattcaccggacgatttcaaggattcgaaacaccgaatctactccggagcatcaagatgccaaaacaaaagtaataatcggcacacccaaatctacgtcctctcttcgaacaattcccgttccccgtcagctactgtcacttttgaaacgtcaacagctgtcccctgacgaatatcttatgaccggtacaatccactataccgaaccgcgcaacgtccagcgaagattcaaaaacatcctggaaaaatgcgatctccctccggtgacttttcattctttacgtcacagtttcgcaaccagatgcatcgaaaaaggtgctgacagcaaagcactttcagagattctgggacactcatctgtaaaaatcacactggatatttatgtccacagtaacatggagcaaaaaagagaatacatcaaccagatgacaatctgacactcattcgccgtcaaaatcatcgtcaaaaaaggtctttcccactgaatctatgggggaaagaccttttttgtcgcttaagggaaagttaagcgacatttcagaatgcaaaaaacaacacggaaggatcgatcagcatgggaaccaagcaaggatacgccatcacaacctggcggctgcgattacggtgcaaacatccggaatggttggagacaacacagaacttttataacgagatacaaaagttctactacgacctctatctggaacgccccgaactctggaatgaaaattcgcagaatgccctgcgcggtctggagacactgagcatcccgggacgaacccggaaacaggtggaatatccccttccctgggacaatgccctgctgtattttcgtcgatccgcagccaatgcagcgattgcagctgcaaaaagctacctgacaagatctgccggtggatacgccggtaagaccgaaacctttcattcggcggtcacctactataaaggaatgtaccgggaactgaccagccatggtgtggaactgcgtgtgtggactggtgacgaatggcactggatgcactgccgcctgtacggaaaaaaattgccggaagacggacaactgatgtcgccctctgtggtgtacgaacatccctacacgatgctccaggttccggtaaaagaagtggtgcaggatgcatccgggctcaaagaacgtatcgcagcagaaagaaatgtctgcggtgtccagtttggaacgaaagatgtatttgccgtggcaagtgtcctgacagctgatggaaaagaggcagcagtccgctacttcaaaggcggaaatcgctacggcgatcagtgccggagagtcgtggaacatatcgacaaatcccacgcttcccacggagaaaatggcaaaggaccggtgaatcagcgttactggatgcagatcaaacacctgaacagccactacgcccaccaggtcagccgggaaatcgtggaatattgcaaagcacacgaagtgggaatcatcgcatttcccaaatatgccgaatcttatgaaaaaaatgtaaaaaaagcctccggcaattacagcgcccttcatctaagcaccagaatccgggaatacctcacctacaaagcgtggcaatccggcatcctggttatcgatattaatgcaaaaggattacatgaaaactgtgctgtctgcggagcaaatatcgtgtctgtcgataaaaaaacacaggaatgcacctgcgaagccggacacaaaacaaacaggtatctgaacatcgcaagaaatacagcgaaaagatgcctggcgcagtttcagaaaaaacagaaagccagtgaaactgcaggataagaaaatggaaaacatacggtctactccgttgttttataaatgcgaaagcaaaaagtgggagccggtttaccggctggctcttacaggctgaacaccgcctggttacgtcggaagaagaagtgacgaagaattcctgcctgaaaaacggagagatccgggaaaaaggtgggagagggtgttcgaagttataacaaagaatcaagaaattaagtaaaagaaagaattggtcagaaacagtatgaagaagaaactttcggtggcaatgtttggacagaaaagactcagccgggaaggtggcgtagaaatcgttgtaaaagaactatgcactcgaatggcaaaggccggtcacaaagtcacctgttacaacagatccggtcaccatgtcagcggagcggaatatgacagaaaaacagaatatacagggattcgccagcgatccgttccaacgatagaaaagaaaggactggcagcagtaagttcttctttttttgcagctctttgcagtgcatttggaagatatgatgtggtacatatccacgcagaaggaccggcatttttctgctggatcccgaaaatgtttggaaaaagagttattgtgacggttcatggaatcgactggcagagagaaaaatggaaatccggattcggatcgaaatttatccgccggggcgagaaaaatgctgtgaaatatgcagacgaaattattgtattaagcgctggtgtgcaggagtattttgaaaagacatacggacgaaaaacaagatttattccgaacggcgtaaatcgtccggagattcaaaaaccagaactgattacagaaaaatatgggcttacgaaagattcgtatattttattcctgggacgactggttccggaaaagggactccgctatctgatcgaagcatataaacagaccaaaaccgataaaaaactggtcatagccgggggctccagcgatacagattcttttatgaaggaaataaaagaactggcaaaagacgatgaacggattctgtttacgggatttgtccaaggaaaaatgctggatgaattatacagtaatgcatatatctacacactgccgtcagatctggaagggatgccgctttcactattggaagccatgtcgtatggaaactgttgtctgacttcggatataccggagtgcacggaagttgtagaagataaagcattaatttttaaaaagtccgatgtggatgacctgaaaaattgtctgcaggatgcctgtgaccaccaggaaaaggtttgggagctaaagaaacaggctgcagattttatctgtgaaaaatataactgggacgatgttgtggaagagacgatgaagttatacaggggagagaaataaatgcggctattgatgatcaataatctcctctaaccgaacgcaggtagtgagatgtacatagtgaaaacgccagaaaaatagcgtatttatggcacttttcgagagatgggtagagctgcgagtgaggtttttatctcgctacctaggttcagcaacaaaagatgattttatcataagaactttcggtatcactacctgcgtttgtatggagcactctggtttatgaacaacacattggaagtgttttatctgaacagaggtagtgaaatagaacatagaataagggaaacgatacgtcagtgcgttttgtattatagactccactatgatgccatacatcggtttaagggagtaagacccgatttttttatatattagagagaaattgggaatagaatgaggaatgatggaaaaatgagcgaatatagaaaaacagatgacgccttaatcagtgtaatagtgccagtatataaagtggaacagtatttggaaaaatgtgtgaacagcataagtgttcaaacatattctaatttggaaattattctggttgatgatggatctcctgacaaatgcggcgatatttgcgattctcttgcaaagaaagacaaacgaatcaaagtaattcataaaccgaatggaggcctgtcatcagcacgcaatgcgggaattgatatagcatctggccaatacattggttttgtagatagcgatgactctattgagccgtacatgtacgaaaaacttttagggctaattaaacatgacggcacgaaactggctgtgtgtgcggttaattatatttatgaagacggaaaaaaggcaaataaggaggcgctcgggaaaaattgtacatttgatttctatcatgcgatagttgaaatgaacacacatcgattttttgatatgggggcatggagtaagctctatcataaaagtttatttgatgatcttcgcttcccggttggaaagctaagcgaggattattatattatgtttaaaatctttgatagagcacaggcaatcagctacttggacactccgtgctacaattatctccagcgaaataatagtattacacgtagcacaaagattaatcatgatcatgagtatgcagccagagaacaaatgatatatcttgacaaaaaatatccagagttaaagattgtaagccacacatcatacgcttcggctacgttgacagtatatgatttttatataaaaaatcaagttatttgtcctaaagagcaacttcagcattttcgcaatgtagtcaaacaaaatgaaggatatatcaaacaggcggactatttgtccaaaagtaaaaaaatacagttttctctttttatgataagtccatgtttatacagaattgtattcaaaacatatcgaaaaatcaagaggatttagagatgagtgatttaatatcaattattattcctgtttataatgcggggaaaacaatagatggctgtgtcgaaagtgttttgaagagcacctactctgattttgaaattcttataattgatgatggctcaaatgttgaaacagctgaggaatgcgataaagtagctttgaaagatcatagaattaaggtgattcatcaagaaaatggtggcgtaagtaaagccagaaattgcggaatcgaaaatgcaaaaggaaaatttataacatttgtcgatgcggatgatacagtagattctgatttgcttgcaagtatgatgaatgctatgcgacaggaacaagctgatgttgtaataactggtcatagagaatgttatgatgatggcagctttaaggaatgcttttgtagcgaaaaagaatcaataaagtgcggaactgaaatactatcagaattcttcacgacaaataatatcagttggacagtgtgggcaaaactatatacacgctctattattggtgatgtaagatttcaagttggaaagcgtattgcagaagatatgtatttcaactatgaaatactaaaaaaggctaaaacggttgtcgaatgtggttctcccaaatataattatatcaaacaggatgagtcggcgatggccagcagtgactgctcacggttttttgactcgttttatttgacaaaagctgtttttgatgacatagaaacaaatgaaaatcatcggacggataaggtgtttttctatgtcagaagtggactctttttcttccgaatgatgtatgcaaaagacagaaacaaagaagctgcggaagacataagaaatgcacgaagagcattcctagacagcattcacgataatacaactacattaccgagacgtatgcgattggaactttttctgcttaagtactgtgaacctctgtataggcaacaagcaaaaatctattggggggggatacaggaagaaaatgtaaagtatgagtccacaattgactcatatgcacagcttagaaaattactaaatagagaaaagaaaaactatcctaacaattggtttgataatatcagttgtaatcagcgagtttataattggcggtttataaagctccttcgcaagtgtgagtattatcgtagtaaaacacgaaagtcaacatgtgttgctatttaggacatatgtgcaaatatcgttgattgttttacctgcgctctacgcaatgtttttgctgaatctgttaaaaatcgaatccctgatgaagttaatggaaattacactgatttgtacagttatagcgtactttatagagccagggcatagaattatcgattttataaatataaagaattggatgggagtttctattatccattcaagaagtttcacagaaagtgatatatgttcggaaacgttttttaatctgttcctgttttttaatttttatagaaatgcgagtgggaaaggagtagactctaggtacacgaaagtgttttataatatttcactggtattcacatttttgtgtttcaaaagattagcaatgcttgttgcggtctgcattattattttaaacaagatggttgattggcgaggttctatttcaaagtattttgctccagtgatggcattgcttttcacaatagctacagttctttatacggaattcatgaaaggaaatttattccctggatttgatatatataattttacgacaggtcgggattatattttgtcactttggaaccaaatcaactatatgtcctatggatatggaagtagcatggtgctgattgggcgttatttagagatggacttagttcagatatatatggaactaaatatcatcgcagtatttgcattttcatatgtatactttaaaattgctggggaaaacgtatactcgattttggtaatgacatatgctttttttaatatgctgactgcgtcaagtctgccaggatctctatcatggattgtagctttcttaacgattgcatctgtttcgtctgataaatgtaggcaggaaaatataaccatcaatgaagaaaaatcacacgtgaagaaattgttttctaagaagaaaggaacaagaaataatgtacaggcaagcgtatcttattatagcacatcggtacgatgaaacgtttaaaacccttttgcaaatgttagatagtgacgaaaatgatattttcgtccacatggataagaagaataagcagtttgatgagaaagaatgtagaggactggttaagcgatcagggctgttttttgcggagcgaacaagtgttacatggggaggatatagccaaataaattcggagatgatattattggaaatggcagtatcgcataaaaagtatgattactaccatttgctttctggacaagatcttcctattaaaacaaacgattatatacaaaatttctttataagtcatcaaggaaaagaatttgtggcatttgataaaaagaagttcgattgtcaaactagagtgcaataccgctatccgttacaggagatggtagggcgcaatcgaaaaagtaaggttggaaaattcgcatcgttaatcacatttgtgcaaaaaaaaatccatttaaaacgaaataaagatattcgttttcaaaagggatctaattggttcagtataacagatgatctagcaaaatatgtaatagagaggaaagaatgggttcgggaagtctttaaaaattcactttgttgtgatgagatttttttacagacaattgtagcaaattcaccgttttttgacagggtgtatcagtatgtgacgattccaaatacagaagaagcagcaatgcgccttgtggattggaagcgtggtgggccatatgtgtttagaaatagcgactatgaagaattgttaaattcaaaaatgatttttgcacggaaatttgactgcgaatgtgatgcagaaattgtgaaaagaatctctaacagaggaaaataagaatggtcaaaaagtctttgagtataaatgcggtacttaatgcaacgcgaagtgttttaaatatgctttttccgttgattacatacccatatattacagcagtgctttctgttgacgaacttggaaagtatagtttttcattatcgattataaattattttgcgctgattgccggtcttggtgtgagtagctatgcaataagggaaggcgcacgaattagagatgacaaaaaggcactgtctctctttgcaaatcaaatgcttgaaatcaacctgatttcaatgtgtgttgcatatgtgttactctttgttgttcttggtgtgtcaattacacttgttccatatagaagtctaattgtgtttttgagtattcaaatgttgttcacgacaataggtgttgaatgggtatacgctatttttgaagaatatcaatatattacaattagatctattgtgtttaaggtaatctcaatcgctctcttgtttattatggtaaagaacgagggagatgtatttcgatatgctgcggtggtgatgtttgcaacaacagggtcaaatattctggatgctttttttgcaagaaaatattttaaattttcatttgttcctttgcaaactttaaagaatcatattcgaccgattatgattctatttgcttctaatattgctgtgatggtatatgtgtattctgacacaacaatgctaggttttatggctgacgattatacggtaggcatttatgctgtatcttcaaaagtttatagcatgatgaagagcgtattgtctgcagttcttgttgtgtctgttccaaggctggcaaatctttacggaacaagagaaattgcgaaatttaaaagcgttgtgcagaatatcacagatgtaattgctcttttgttgattccaagcgttgtggggctgattcttcagtcaaaaaatataattttgtttatttcaaatgaaaagtacttacaggctgttccgtctctagtgatattaagtataggactaatatcttgtatgtatggatggatatacaatcaatgtgttttattaccagcacaaaaggaaaatgtaattctaatagcgacaattatcagcgcaattgttaatgttggattgaactttattttaattgaaaattggagagaaattgcaacagcatttacaacattgattgctgaaagcattatgttggcgatttgcagacacgagagtctgcaaatttgtaaaattaagatatttaacaaaaatttgatcacggtaggtattagtacagttgctgttatttgcatttgcaaaattgtgagtttgtggaaacttcaaagcacagtagaactattcgttagtgttgtgctttctggaataggatatctggtggttcttttgattttaagaaatgagctagtcataaaaataatgagaaaattgattgatgggctgaaaatgcataactggtagtttataaaagtacatgtttgatatatgaggaaatgtaagaatgaaaacaacattacttatcatggcggccggaatcggaagtcgatttggaacaggaataaaacagttggagccggtggatgcttctaatcatatcatcatggattactcgatccatgatgcgattgaggctggcttcaatcatgtggtatttattatccgtaaggatatcgggaaagagttcaaagaggttattggtgatcgcattgcctccatttgctcttctcataacgtaacagtagactacgctttccaggatatcaatgatattccgggagaacttccggaaggtcgtacaaaaccttggggaactggtcaggcagtgcttgcagcgaaaaatgtgattgataccccgttcattgtgatcaatgcagatgattactatggcaaagaaggcttcaaagcagtccatgagtatctggcaaatggcggaaagtcctgcatggctggtttcgttctgaagaatacgctgtctgataacggcggtgtgacccgtggtatctgcaagagggacgagcagaacaatctgaccgaagttgtagagactaagaacatcgtaaagactgcgactggagcagaggtagacggtgtggctgttgatgtgaattctctggtttccatgaatatgtggggtctgactcctgatttcctgggtgtgctggaagaaggtttcaaagagttcttcgaggaggaagtgccgggtaatcctctgaaagcggagtatctgatccctatcttcatcggtgaattgttggagcagggaaagatggctgtgaaggttctgaaaaccaacgatacatggtatggtatgacctaccatgaagatgttgaagcagtaaaggacagctttaagaagatgctggcgaatggcgtgtataaggctgatctgttcagtgatctgtaaacgacgatgaaagaaacgattgagttactcggaaaaatcctcacaaacatcctgactgctctctatgagccgtttggcttctcgcttcttctttccttcctggcgatgtttttctacctgtatgcgtatgagccaatacatgctggcaaaggctggaagagtgccatagtgacatggtataagaattttaaggaaagtgtgtttttccggaagttgtttttcttattttttgtgagctcacttattctgtttcgaactctgttaaaccgaaccctgtggatgaatcctttatctgatgtaatgggcgattggggcatatgggagacagtaaatggcgaacagaagctgaccaccgagtgcatcgagaacgtgatcatgatggtgccgttttcagcagtagtgctgtggacattcggagagaagataggaaacggctggaagaaaatactgtggcaaagcgggaagatagcgttcatcttctcgataagcattgagatgttgcaattattgctgcggcttggcacattccaagtctccgacatcgtgtacaacacgctcggtggtatgctgggtggattatgttacatagagataaagaaagtccgcgaaagactgtcaaaataaggaattccctaagctatatttgaaaagatattaaaacccaatataaggcgaaaatcacaagtaaagaaataacttgtcggtaatcggttttaaactgtcgtttggtaactattatagaaatgtcataaagagaagcgacatagaaattgactttagtcaagctacaggaagaaatcaaaagtccatagtatctgaattgtaatgaactaaaatattaaaagaaaggaaatatgtgataattaatttccaaattatcatacaaggggatatgagaagaaaaatagtatcattttttatgattataattatgattttatcgtctgtttgggttactccgatcaaaagttatggacaaacagaaaatgaaatgtcgagtgcagaagatggatcaaatataaaagctgatcaagaaccatttgaaaaatctgagacggattcagcagatgatgtagaattaaaaaataatgttgaggagaatgctggagttcctttggataatgtaagtagtgaggaagcattaacagaggaaagctcattggaagcagaggattcacttgattcggaggaagcgctggaacagaacacggattctgacgtttcaacgcaggaagagatagcctacagttataacagcacaagtacttccggaacagtaacactaaaggttgaatggaatgaaccggttttaggacaggataccacatttcatgtctctgcaacgggtggcagtggcgcttacaaattcagaatggatgccccgagttattcagacccaaacgaatatgcttatgaatcagtggcagatccgagtcgtggtgaatggttaaagtatacagatgcttgcagttcccaggattatacatttaggatgactgcttctggaacttacaattttagattttatgttatggatactacagcgggtgtgtattacctgcgtgtaagtacatacattcaggtatcggatgaaaattatcccagtataaaaacgatcgtttcttcggcggtagatcaggcaaagaaagagacggatgggtctgattatgaaaaggcattgtggctacatgattggctccttcaacagctggattatgataattcattgaaatggtcttcagcagaaagtgctctgacacgaaaacttggcacctgtcaggcctatgaaagtgcatattctcaacttcttacagttgccgggatagagaatgtcgagataagagatacctatgatggacatacctggaatgccatgaaactggatggggaatggtatcaggttgactgtacatgggatgatacaaaagacaacttttacaattttgatgctactcatttatatttcggattaacagatgagcttatggcattagcacataaaggtcataataatatttatacagctgacggttacagcacgcgttctacaagtttggcagataactattttgtcagaaatggagcggcgaaagaatgggcgcaaaattatgtagacaggattcagaaaaatttagattcggaagaaacagaatttacaatcagtgcagacaatgcgtcttatcctccaagcatttccggtattcagaatggcataacagcgtacgcaatacagcagatggaatggatggcgggagggaaaaagataacattagaggtcagtggaggagcaacagaattcgtctttcacgcagtatattctgcatgtgagcataagtgggatgagggaaagatcatcaaagaacctacatatgaccaggaggggattaaacggtatacctgtttatattgttcagaaacaaaagacgagcctattgaaaaactgaacaaatatgacgaaagcgtttcgtataaaacaagagtgcaggatgaaggctggcaggactggaagaaagatggggagttatcaggaacagtcggaaaatcaaaaggaatagaagcgattgcgattgaacttagcaattcatcgattcaaggggatattaaatacagaacatatacacaaaatgcaggctggcaggattggaaatccaatggtgagatcagtggcagtgacgatgagacaactaaaatagaggcgattgcgattgaacttacaggtgaactgagcaagagctatgatgtgtattatcgagcgcattgtcaggattatggctggttagactgggcgaaaagcggggagaaagccggaagtgaaggctattcgagacgaatggaaggaattgagatccgattagtcaaaaaaggagagaaaacgccagaaaccgggggcaaatcgttcctggtcaatacatcaaccaatttggtatcatataaaacttacgttgaagggcaaggctggacaaactatgttacagatggaagatcaagtggtacagtaggagaatcaaagaaactggaaggtatcagcataagattgtcttccggtattgatggaaccgtgcagtataaaacatatactgaaaatgatggctgggaagcctggtcagaaaatggtgaaataaacggagagccggacggaacaagacggctggaggcgatccagatccggctgactggggaagcagctgaaaaatatgatatatattatcgtgtgcactgtcaggatgatggatggcttggctgggcaaaaaacggagaaaaggccggaagtgaaggctattcaagacgaatggaagcaattgagatacgtttagttgccaaaggacagtcattgtctggtggtgaaaaaacatcatttgcagtaaatctaaactccaaactcatctattatagaacatatgtagaaaaacaaggctggacaaactgtgttacagatggaagacaaagtggtacagtaggagaatcaaagaaactggaaggtatcagcgtaaggttgtcttccggaattgatggaaccgtgcagtatagaacatatactgaaaatgatggatgggaaacctggtcagaagatggcgagataaacggaaagtcggacggaacaagacggctggaggcgatccagatccgactgacagggaaagcagccgaaaaatatgatatatattatcgtgtgcactgtcaggatgatggatggcttggctgggcgaaaaacggagaaaaggccggaagtgaaggctattcaagacgaatggaagcaattgagatacgtttagttgccaaaggacagtcattgtctggtggtggaaaaacatcatttgcagtaaatccaaactccaaactcatctattatagaacatatgtagaaaaacaaggctggaaaaactatgttacagatggaagacaaagtggtacagtaggagaatcaaagaagctggaaggtatcagggtaaggttgtcttccggcattgatggaaccgtgcagtatagaacatatactgaaaatgatggatgggaagcctggtcagaaaatggtgagataaacgggaagccggacggaacaagacgactggaggcgatccagatccgactgacaggggaagcagcagaaaaatatgatatatattatcgtgtgcactgccaggattatggctggcttggctgggcaaaaaacggagagaaggccggaagtgaaggctattcaaggcgaatggaagcgatggaagtgaggttggttactaaaggtaatgcagcacccggaaatacaaataattgtttctatgggagataagcgttatccggaatatgatatgctgggagcggtagctccctgcgctgctctgataatcacacacctcttcgtggtgagcagcaggcaacgatctgagaatcaggaattcaatggtcggcgaagatgtgagaaaagtattatagacaaaattcatacaattacctattgtgaatatgatgaagctttctgctctgaagaaggctcaaaaagaagtggcatctcctggataattgtcaaaagaaaatgtagggaccagacatgggtgcataaatgtatgtctacgaatattgataatattgaaaatatcagactgtaaaacaaattgtatttgacgaaacataacttttagggtatgataattacaagcattttatattttctttacggcactcagccgtatctatttgattcaaaccgcgttcgcggacttagaaatttccaatgcaaattaaataagagagggtcagaggagggttctgaggaagcgaagcagaggatccttctctcgaaagacaggaggattttatatgagtaatgtaaaagcagcgaaggattacaaagatcgcttatttcggatgatctttaatgacaaggagaaattattagagctttataatgcgatgaatggttcggattataaagatgccagtgagctacaggtggtgacgctggagaacgcgatctatttgtcaatgaaaaatgatgtagcttatgtgctgcatgatgaactgtttttgtttgagcagcagtctacaaaaaatgcaaatatgccgttacgctgtctgttttatgcaagtgacacgtattcggtattggtgaaggataagaatatttatggtacgaagatgcttccgcttccatcacctacgtttgtagtgttttataatggaaaacagaagatggatgaggaaggggaactgagactttcggatgcctttgttaaaaagcaggagattccgaatctggaagtgatcgtaaaagtgaaaaatatcaatatgggaaacagccgggaacttttcgaaaaatgcagaccgatgcgggattatatgatttttgtggataaggtaagaaggtattcacaggagcaaccgttggaagacgcagtggaacggacaatccgggagtgtatggaagaagacgtgatggctgatttcctgaaaaggaacagggcggagggtattaacagttaaatatagattataaaattatataagtatatgttgagttttataagatattagagtggaatattattgaaaggagatgatactttgagtaaatattattctatacatgaattttcaaaaatcataggtgtatctgcccagacattacgaaattgggatgccaatggaaaacttcatccgcatcatactacagtaagtggctatagatattattctgatgagcaactcaaccaggtaatccatgtaaagcctaaaaaccgcattacaattggatattgtcgtgtttccagccataaacaaaaagatgatctggaacgacagattgataatgttaagacatatcttctgacaaaaggacagccatttgagataataagtaatatcggttccgggattaattataagaaaaaaggacttcaggatctgctcagacggatatctcaaaatcaggtggaaaaggttgttgtcttatataaagacaggctattgagatttggctttgagttgatagaatatatcgcttcactttataattgtgagattgagattattgatcatactgaaaaattcgaacagcaggaacttgttgaagatctggttcaaataatcacagtattcagttgtaaattacaaggaaaacgagcgaacaaagccaggaaacttatcagggaactgatacaggaggaaacagatggtaaaagccataaaagtaatgctgataccaaacaatgtacagaaaactaagatgtttcagtacgcaggtgcttcaagatttgcttataactgggctttggccaggggaaaagaaaattatgaaaaaggtggaaaattcatttcagatgcagaactcagaaaagaatttacaaagcttagacattctgatgaatatgcatggttactgaatatttcaaataatgtaaccaaacaggcaatcaaagatgcctgtacggcttataagaactttttcaagggtttgcaaaaattcccaagattcaagtccagaaagagatccatgccgaagttctatcaggacaacgttaagatacgattcagtaatacccacgttaaatttgaaggcttttcctccggcaggaaagcaaataagcaaaaaatgaattgggtaagacttgcagaacgtggacgcattcctacagatgctaaatatatgaatccgagaatatcctttgatggattgaactggtggatcagtgtatgtgtggaatttcctgactgcagggaaacgcttaatgatgatggggttggcatagacttaggaatcaaagatctggctgtctgctctgatgctgttaaatataagaatatcaataagagtcagaaagtaaggaaattagaaaaacagaaacgcagattacagcgtagtatctctcgttcttgcgagaaaaataagagaggagaaagttactgtaaaacaaataatgtaatcaaaaaggaaaaact

SEQ ID NO: 649 - DNA, 27775 bp, Oliverpabstia intestinalis
  source 1..27775: mol_type = genomic DNA
tagacccaatattggaaattatagctaccaatccacgggtcgattttggcatgccaggggatctggttcattttgtggagcagttttataaacacggatatgaggaattattgattgcttcagtaagaaaccatccaacgccatacaatatctggatggtgcaccgctgctataatgacacagaaaatccgaaacgtgaaaaatttgctgaacttatgagaaatttaaaaaacgacagttctgtttctgtggagattaagaacagtattgatgactttgattgggaatattaaaaagatactgaaaaaaagaataagtagaccgggaggaaaaatcatatgagtagtattccggtgttttatacatttttctgcatagcgacagtttgttcgataatgattatcgttatgcgctggaaaagatatatgaaatattccaacggaacgtataaaaatgcaggacaggatttaatatttcaaacggaaatgccacaggatgaaataatccgaaaattggaaaaacatgaaataaatgatacattggattatgatttttttgaacaaaatcatgagtattttctcagagtaaaaggaataaaaagatttccttgcagtggaattttatctgcagttttccgtgttgaatttttagaaaataagaaaaaatatattattattaggcaacacaataatttccaaatattgtattcatcaggatatgaggcggaaatatttgagtttatggtgaaaaaattaaattgcattcctcaggaatcaataaataagtagaaatatgagaccatatagaaatattctttaagaagaacagtttaaaggatatgtttttgaaatggggaaaatgatataaagcgataggaagtgtgaaaagatctctatgaatttaaaaaatctggaatatataaagaaaaatgctcctgcaacgaaagaagaaatagaaaacgtagagaaacatatcagtggtgtattgccaaaaatctacaaagaatttcggagacaggagaatggaatggatttgaatttgtgtgtattatatgatacgcacagcattgttgaacgttatgaatgcaatgaatttgcagactatgctcccggatatataagcataggaaatgataatgggcatcgggaactcattatgaaagcagaaaagggagctgtattgtgcggctttttagatgtggcagaacttggcgaagggaaaccagaagaatggtttgaatttaaatcttgggtggagaacggttgtgaaatggagcaggatgatgaggaaactgacggatatgggaaggtatacattttgagactgccagaggaaaaattaaagtttttggcagagacgaaaaagatttttgcactttccatatctacaggcgttctttataaacaggtgaatactctgcaatgtgtcatcgtacggcagattacggaagcaatggcagacattttgatacagaaaacatcctatctggagtgctataaattcggaaagtaaagacactttttgaaaatcattataaacaggaaatgccgtccttgtgattaccagaggaatccagtataatatatcttataaaatcttgacggggaggaatttgcatgggtagttatttgaatccgggaaataagggctttcaggaaagtctgaattcggaaatatatgtggataagactggtctgattgagaaaacaaatgaggttcttgatacccgccagaagttcctgtgcgtcagccgcccacgacggtttggaaagtcgatggctgcggatatgctggctgcttactatgaacgtggagaagattcagctgaattgtttggaacgttaaaaatcagcaaggttgagtcttatgaaaaaaatcggaatcaatatgacattatcaaagtaaacatgcaggaatttctcagtatgacacacagtatggatgagatgttgtccatgctgcagaagtatctgatctttgatctgacagatcattttgacaatgtccgtttccgtgatgaaaataatctgattcaggtgatgaaggatatttacagtaagacgaaacattcttttgttattctgatcgatgagtgggattgtctgtttcgggagtatcagcaggatcaggaggcacagaagaaatatctggatttcctgcgggcgtggctcaaggacaaagattatgttgcactggcttacatgaccggtattttaccaataaaaaaatatggttcgcattcggcattaaatatgtttacagaatattccatgacggatcccggtgagttggcagagtattttggctttaccgaacaggaagtggcggttctgtgcgaaaaatatggaatgagttttgaagatgcaaaaacatggtatgatggctatcgattaattgcccatcgacagacgggaaatgaatgctattccatgtacagccccaaatcggttgtagaagccatgctgcgtcataagttcggaacctactggaaccagacggagacatatgaagcactaaaaatctatatccagatggatatggacggcttaaaggattccgtggttcgcatgcttgcgggagaatctgtccccattaatatcggaacattcagcaacgatatgactacctttgcaacgaaagacgatgtgctgactctgctggtgcatctgggatatctgacctatgacagtgtggatggaaccgtaaatataccaaataaagaggtttcccgggaatatgtaaatgccatcagcaccatgaactggcatggcgtggcagagtccgtggaatcttcccgcaaattactggaagcactgtgggacatggatgcagatgcggttgcaactggaattgaaaaagcacatgaggaaatttctattcttcaatataacgatgaaaattccctgagttgtacgattcagctcgccttttactttgcacgggaatattatactatagttcgggaattacctgcgggaaagggatttgccgatgtatgtatgattccgagaaagaagtatcctgataaaccggctgtcgtgatcgaactgaaatgggacaagagcgcaggtggagcgatagagcagatcaaagaaaaacagtatgggaatgcgttaaaagagtatcaggggaatttgttgcttgtaggaattaattataataagatgactaaaaaacatgaatgcgtcattgaaatcatgcaaaaataaaattacagattaaaaaattaagaagatcaggaactcgtccggcgttgagattcacagaaatctgtactataataggtatcagaaaaaagcgatgaaaatgggacaaaggaggattttaccatgaacaatgaagtattgaaagcaatgaaaacccgcagaagcatccgcaaatacaaaccggagcagatcacagacgagcagctggatgcgatcctggaagccggaacgtatgcggctaccggaatgggaaaacagtctccggtgatcgtggtagtgcagaaaccggaactgatcggaaaactttcgaagatgaacgcggctgtgatgggaagcagcaatgatccgttctacggtgcaccgacggttctgatcgtactcgcagatccggagatcggaacctatcatgaggacggttctctggttatgggcaatctgatgctggcagctcatgcggtaggtgtggattcctgctggattcaccgggcaaaagaagaatttgagagtgcagagggaaaagaactcttaaaagagtggggacttccggaaaatctggtcggcatcggacactgcatccttggatatcgtgactgtgaatacccggaagcaaaagaaagaaaagcgaactatattgtcagagtataggaagagctttcgtaactgtgaaggtactgaacagttacgaactttcataaaaacgtaacgtaactgctccgaacatgaacaggcagtgcgaaaataaaaagataagaaaaacagaaaacgggttgtgtcctgaagcgagcagaaacgggagagtttatatataatgtttccgtgtgccacaaaaggtatacagcccgttttataaaaattcaaaccaggaatcttcccgatgacctacccatgggaagatttagaaaatgaggaatgtatgtatcgaattatgatcgtggaagatgatgaagtgattgcaaatgcgatccggcaacacctggtttcgtggggcatggaggcgttctgtgtgcaagatttttccgatgtgctgacagaatttgccgcaatcggtccgcaactggtgctgatggacattcatcttcccttttttaacggttaccactggtgccaggagatccggaaagtgtcgaaagcaccggtgcttttcctttcttccgcttctgataatatgagcatcatcatggcagtcaacatgggcggtgatgattttatcgcaaaaccatttgacctgaatgtgcttactgctaaggtacaggcactgcttcgaagaacctatgaatttgctggagccacgaatctgttggagcacaaaggagcaatcctggataaagaaaacgggattctgacgtatcagggagaaaagatcgaacttacgaaaaatgagtggcggatcctgcaggtcttaatggaacacaagggaaaagcggtgagcagagacacgctgatgatgcggctgtgggagtcggatagctttattgatgacaatacactgaccgtgaatgtgacgagacttagaagaaaactggaagaaatcgggctttcggattatattcagacgaaaaaaggtgtgggatatctgttgacataatatgggatttatcatatggttcaggagatttttacagtgttactcttttgaaaagaggattctgagagaaggaagtagaaaaacggagaagaacgatgcaggaaaagggaagaaaaaagaatcaggaaaaaagaattatccttgcatttttgcgggaagaggcggggatccttctctgggtggtgttttttatcggaattttttggcttttgtgtttcctggaagatattccacaggatgtcaccatttacacattgcaacttgcctcttttaccggtatcgcagtattgatcgttcgcttcatccactatcggaagcgctgtaagacactggaactgctgacaaaggatcccagagacaagatagaagcgttcccgaatccggacactctgtcggagaaactgtaccggcagatcatcgggcaatatgagcgggaactgcgaaaagaagaacagcagatggatgacagataccgggagatggtggagtattatacgatgtggacccaccagatcaaaacgccgatcgctgccatgcacctgttattacaggaagaagaaacaccggtttccaaagaattacagggagaactttttcaggtggaacagtatgtgcagatggcactacagtatttgcggatggaaaggatgaacacggatctggtatttgaaaaacaggaactggacgctctgatccatcaggcagtacgaaaatacgcacctctgtttatccgtcgaaagatcgcattgcaatatgaggatgtccattgtcagatacttaccgatgaaaaatggctggaatttgtccttgaacaggttctctcgaacgccctgaaatacaccaggaagggaaagataaaaatttatatggatccacaaagccctaagacgctggtgatcgaagataccggtatcgggatagcaccggaagatcttccacgggtctttgagcgcgggtataccggctacaacggtcgcacggacaaacgatccacaggtatcggtctgtacctgtgcagacagatcatggaccggctttcccacacgatccggatcgaatcggagatgggtgtgggaacgcgggtgtatcttgggctagatacggtggaattataagaggatcaggacgaaaagcctttttcagacacgctctagcgataaaatgagaatgctaccgggaaccttacacgaatgtaaggtttccggtatttttgtaagcagaggttaaggcagccggaagaatggattgctataataagcctgtaaataggaacagaaccgacagatttcgataaagaaacagaaaatagcgggttctggaaaacacagtacagaaaggacagaaaaataaatggtaattctggaagtagaacatctgaaaaaaacatatacgacccgccttggaagcaaccgggtggaagcgttacgggacgttaatttcaatgtggaacagggcgaatttgtggcaatcatgggagagtccggaagcggtaagaccacactgctaaatctcctggcggcacttgataaaccgaccggtggtcagatccggttaaatggaaaaaatctgggagatctgaaagaaaaagagatcgcggcattccgaagagaaaatctgggatttgtctttcaggattttaacctgctggataccttttcactgaaagataatatttttcttccgctggtactggaaggaaaacattaccgggaaatgaaacaaaaagcagatcctattgtcaaaaaactgggaatcagtaatttgctggaaaaatatccgtatgaagtgtccggcggacaaaaacagcgtgctgcggtggcacgggcactgatcaccagccctcagctggtactggcggatgagcccagcggggctctggattcgcatgcggcagatgcactgatgcagctgtttgaggaaatcaatcaggagggacagaccattgtgatggtcactcacagcgtgaaggcggcctgtgctgcaaaacgggttctttttatcaaagacggagaagtttttcaccagctgtaccggggaaatctgggacgggatgagatgtatcagaagatctcggatacgctgaccattattgcgacaggtggtgagcgtcatgaatagtctgctgtatgcaaaacttgcaaaaacaaatctcagtaagaacagacagaatattcttccttattggttgtcgtgtatcggtacggttataatgttttatattatgagtactctgtctttgagtgaaggtcttaaaaaaatgatgggggaagccacgattcagatagtaatgcagtttggcgtatatatcatcggactttttgctgtgatctttctgatctacagcaacagttttctggcaaaacgcaggaaaaaagaatttggactgtttcagatccttggcatggaaaagaaacatcttgcaaaggttctgttttttgaaagcctgtatctgtggatcctgtcggttggaggtgggattctgcttggaatcctgtgttacaagctgctgtttctggtgctgttaaaactgacccggttccagggaacgatccattttgcttttcactggaaggctacaggaaacacggtggttttatttgccgtgatttttctgatcaattatctgaaaagcctccaccagatccacgcagttcagccgatagaactgcttcatggtgaacaggagggagagcgggagccgaaaacgaagcttcttaccgcatggatcggactgatttgtctgggacttggttattatctggcactgacctgtcagaaccctatggaggctctgggcaagtttttcggtgcggtgcttctggttatggcgggaacctactgtctgttttcggcaggtagtatcgcactgctgaaactgttaaaaagcaacaaaagatattattaccagacgagacacttcaccagtatatccgggatgttataccggatgaaacagaatgcgatgggacttgccaacatctgtatcctgtctaccggtgtgcttctggtaatctccaccaccagttgtctgtggtttggcatgcaggaaattatccagacaagatttccccatcagatagcggtggaagtcaacgacactcttatgtcggccaatggtgacagtactgcgctgacaaaagaagaaatcagttctgtgcgggaacagattaacaactatctggaggagcagcaggtgtcaaaacgatttgaacgggatgaaacctactggttagcagtggcagaaaacaaagaaaactgggtaggcctgacgcaggaactgaaagggtttgaggacggtctcagcatgatcgaattcatggaagcttcggaatatgaacggctgaccggaaaatctgcagatctgaaacctgggcaggtacttgtatttaccagaaaagaggaaccatacaaatatgatacgatacagttcggagatacgatcagctgtgaggtaaaacatacggaaaatacacaggaagatatggtggaaaccacaaatgtaatgtatgataccagaattatcgtatttgcagacggagaagaagcacaggcagcatatgtggcaatgaccggaagaacacctgccggatacagctggaagtatcagatagatctgattggggatacgaagcttgagacgcggatcggacagggaattgagaagcttgtgaaccaggcgcaatgtgacggctatgtggaagtacgggaaaataacaaggccagcctttatcagatgtacggctccatcatgttccttggaatttttgtcggtactttgttccttatgggtgcagtgatgatcatttactacaaacagatttccgaaggatttgatgaccggaagcgttttcagatcatgcagaaagtaggcatgagccgtcaggaagtccgccagaccatccggtcacaggttgttaccgtatttttcctgccgcttgtagtggctattctgcacaccgtggtggcatttccggtgacgagacagctgatgacgatgatgaatttcccggacagtggtatttttctggtagccactgcagtgacgattgtggcgttcgctattgtgtacctgatcgtgtatataatcacggcaagggcatattataagatcgtggaataaccggaaatattttatagaaaagtaaaacaatctttttgcgtttttttctgttagtcgtgactttatccggtaagcgtggtagaataacaagtattctgtgggtgaggagtcccgcagggcattttgagagaaaatgtcggaaaagttaaaagaaagagagtgaaaaagacgcagatgaataagaaaagaagcgcattttcaggaaaaatcggctatgtcctgtcggcggccggtgcgtctgtcggactgggaaatatctggagattcccgtatctggcggcgaagtacggaggaggaattttcctgctggtgtatatcatactggcactgaccttcgggtatactatgatcgttgcggagtccgcccttggacgtatgacaagaaaaagtccggttggggcatttcgaagctttgcaaagggaaagaaggttggctggctcagattcggtggctggatcaacgcgatcatcccggtactgatcgtaccgtattattctgtaatcggtggatgggtagtcaaatatctgtttgagtatatcagaggaaatggaagcaaactggcggaagacggatacttctccggttttatctcaaacggtggtgctacagaaatctgttttgtgatcttctgtatgtttaccctggtgatcatctacgcaggtgtacagaatggtatcgaacgtgtatcaaagatcatgatgccgattctgatcgttctgtccgtgatcatcgcgatttattctgtcacaagaccgggagccatcgaaggtgtgaaatatttcctcgtaccgaatgtgaaaaatttctcctggatgacggtagtggcagccatgggacagatgttctattccctgtccatcgccatgggtatcctggtaacctttggttcttatatgagaaaagatacctccatcgaagattccacaagaaacgtggaaatctttgatactgcgattgcgatgatggcaggtctgatgatcatcccggcggtcttcgcattctccggcggcgatccggataccctgcaggcaggtccgtctctgatgtttatcacgatcccgaaagtatttgccaacatgggattcggaaccgcagtcggtatcctgttcttcgtgctggttctgtttgcggcagtgacaagctctatcgccctgacagaaagtgcggtatccactttcgaggatgaactgggctggggaagaaagaaggcaaccgttctgaccggtgtgatcatgatcactctgggaaccctgtcctgtctgggatatggtcctctggactttgtaaagatcatcggcatgcagtttttggatttctttgacttccttaccaactctgtaatgatgccgatcgcggctctgatgaccagcctcctggtatcccgggtgatcggtgtggacaagatcgaagaagagatccgccatggcgagagcaccttccgtagaaagaagattttcgtagtcatgatcaaatacctgtgcccgatcttcgcactgatcattctggcaagttctgtggcaaatgcatttggatggatagctatgtaaaaatggatgaatgaaaaagtgaaaagtcgttgttctcagtatttttttgagaacagcggctttttactttttctgaaagtatgtgttgacaactatagttgtcaatgatagaataaacacaagttaaatgacaaataaagttgtcaaaatgacaagaatgcaagtcaaaacagaaacaagaaaggagaagcagatatgccgctggaaaacaggttaaaggaacatcgcgccagacttggcatcaatcaggcggatatgggaaaacgggcaggagtgtcccggcagacgatcagtctgatcgagcggggggattattcaccgtcggtaacgctggcgctgaagctggcaaagatctgtcaggtaaccgtggaagatattttcagctatacggaggaagagaatgatgaataaaacaaaaaagaaaaatgtatatgtaaaatatgcggtaatcatgtgtatcagcggtgcgctgggaggaattctggggggtgtcatggaaatgggacatgtgcatggagttctgacaggtattcaggagggaatgcaattcttcctgaacagtgtccgcacctggatgcttccgctgatggcaatctgtggagtgatagcgctggtactttgtgagcagtatatgggcagactgaaaagagcgggcgaagccatggaacaggcagaagatgaagcgtatgaacggctggattacgagctggaagctgcgggaagtaggggaatgatcgtaagctttgccggaagtattgcgatgattctgtttctcgcaaccggatattccacaaaatatattgaaagtctgaacggttctgggataatgtggtttctgcttgaaattcttacatttattgcactggaagtgtatctgaatgtatggcagattcgctatgtccgcgtgatacagaagatctatccggacaaaaaaggagatccgacttctttaaaattcccgaaacagtggctggaaagctgcgatgaggcagaaaaggaatgtatctaccaggcaagctacaaaggctatcagaccgtgatgaaatgggcgccgatcctgacgtttgtggcgctgatcctgcatatgttttttgatacggggatccttgccatcgtgatgacgtcagtgatctggctggtaacatcggtgacatactgtagagcgtgtctgcagaacaagggagaaaaactgagcaaataaaaaagataacatcctgtacggagagaatggaaagcgtttttttgtacaggattttttgtgtaaaaatactgaaattaaacacagatacagaaaaatatggtaaaatttgcagtgaggaattctgtgcaaaaaagaaaatgatatttggcacagaaggggatttttacagcaatataccaaggaggagaagaaaaatatggacagagcgcaggcaagaaaaaaagcagaagccctggtagcaaaaatgaccatcgaggagcgggctggacagctcaaatacgatgccccggcgattgaacggctgggaattccgacttataactggtggaatgaggcacttcacggagtggcacgtgcaggtactgcaacggtatttccacaggcaatcggttgtgcggccatgtttgatgaagaggagatgcagaagatcgctgatgtgattgcagaagagggcagagccaagtataatgcattttccaaagaagaagacagagatatttacaaaggactgactttctggtcaccgaacatcaatatttttcgtgatccgaggtggggacgcgggcatgaaacgtatggagaagatccgtttctgaccgcgagactcggtgtgtcatttatcaagggattacagggagatggtgagacgatgaaagtggcggcatgtgcgaagcattttgccgtacattccggtccggaggcgatccgtcatgagtttgatgcggtagtttcacaaaaagacctgtatgagacttatcttccggcttttgaggctgcagttaaagaaggcggtgtggaagcagtgatgggaggatataatcggaccaatggagaaccaagctgcggaagcaagacgttactgaaaaaaattcttcgggaagactggggatttgagggacatgtggtatcggactgctgggcaatccaggattttcaccagttccataaggttacaaacggaccgaaagagtccgcacagatggcactggaagcgggatgtgacctgaactgtggatgcacctatgcatatatcatggctgcactgcaggacggactggtgacggaagaacagatcaccgaagcctgtatccgtgtgtttaccacccgttttcttctgggaatgttcgacggaagtgaatacgatgatattccatatgaggttgtggagtgtaaggaacatcgaaacctggctgtggaagcggcgcacaagggaatggtacttttgaaaaatgacggtatcctgccgttggataaacggaaaatccgtacgattggcgttgtgggaccgaacgccaacaaccggatcgcactgcaggggaattatcatggaacttcttcccgttacgtaacggtgttggaaggtatccagaaagaagtggaagacgactgccgggtatattatgcagaaggatcacatatgtataaagatacgatggaaaatctggcctggaaggatgacaggatctcggaagcggtgatcacggcgaaacagtgtgatgtgacgatcgtggtactgggtcttgatgaactgatggaaggagaagagccggatcagagcaaccgtggacaggcaggagacaaagcctctctggaattcccgggctgccagcagagactcctcgaggcagttactgctgtgggaaaaccggtgatcactgttgttctctccggaagcgccatggatcttcggtatgcggatgcccatacgaatgccatcttacaggcatggtatccgggagcagagggtggaactgctgtggcggatgtcctttttggcagagtatcgccgagcggcaaattgccagtgaccttctataaggatacctccgacctaccggaatttaccgattattccatgaaaaacagaacttaccgttatatggaacaggaagcgttgtatccgtttggctttggtctgacttatgggaatgtgaaggtgtcagcagcagaatttgctgaacagccggaaaaagaaaaaccggtaaagattcgctgtacggcgacaaatacgggaaaatgggatacagaagaggttgttcaggtttacatcaaagactggaagtcaaaatatgcagtccgaaatcacagcctgtgcggattccggcgtgtgagggtgaaggcgggagagagtatcgagacagaacttaccatcgatccgcgggcatttaccatcgtggacgaagagggaaaacgttatgtcgatagcaacaaattctctctgtatgtagcaaccactcagccggatgccagaagtacggcactgacgggacacgaagcggtggaactgcgggtagtgtttgcatagcagatggaggtgccgggatgcagatgacatttcgctggtatggcgatggaaatgatgatattacaccggagatgatccggcagattccgggcgtgggcggacttgtctgggcacttcacgacaagcagccgggagagatctggacagtggaagagattgagaaagtgcgagcgcgcatcgagggtgcaggttttcacatggatgtggtggagagtgtcaacgtccatgacgatattaagatcggtctgcccacacgggatcagtatattgaaaattataagacaacattgaaaaaccttgcaaaattcggtgtcaaagtagtgacttacaattttatgccgatctttgactggacacggacggatctttttcatccgctggatgatggatctaacgcgttatattatgaaaaaagcaagatacaggatgattataaggagatggcggagtatatcctggaaaatctgcacgggaaaacatttccgggctgggagccggagcggatggcgaaactggatgaactttttgaggcgtaccgcccggtgacgaaggaaaaactctgggaaaacctgcagtattttctggaagccattatgccgacctgccatgagaccgggatcaagatggcgatccatcaggatgatcccccatgggatattttcgggattccgagactgctttgtgataaagaatctataggaaggtttcttcatatggtagatgatgagtacaactgtctgtgtctgtgttccggatcgttgggtgcgaatatggaaaataatgtggcagatatcattcgaacctactgtgaccggatcgcttttgcccatatccgaaacctccgacactacccgaacggagatttttcagaagtttcccacagagactgtgacggtgataccgggattctggaaattatgcgagcctatcacaactgtggttataccggctatgtacgcccggatcacggaagacatctctggggagaagaagcccattgccgaccgggctacggactgtatgaccgggcactgggaatcatgtatctgtggggatgttgggatatgctggaacgattggatggaaaaatctgaggtaaccgaaaacagtcaaatattgtatggctgttctatatacctgtaacgctcaaaaacattcgtaatatgcacgttttactttggagaatggctacttactcatgtttttgattctgatatttcgtataaaagaaaaatatatatattgaaaaataaaaatggaacctgacaattcaaaaaatgaatgcctggttccattttttttcattgcatgagaccttgacgactgccgcaccaacgagtcaaattcgcgaagcgttcaacgattaagcaaaggttttaataaagcagccatcctctgtccaggccttccattcttccttcacatcttcattcggatctccctgcttcataaagctcgtccagcaggtcaccatttcctcagccagtgcatgatcctcatcggtcatcgggcgccagcaacggttcagagttccgaaggtgtaccacagttccgaagagtggaaagcaccgtcatcactacccggcagatcatggcagaattcatagagatataccggaagattctgcttccggcaggcatttgcaaaagaaacggcagcagtgaagaacccaccctctctgtgggaagcaccctccggaataaacagatcatccttggtaacacccatcagataagggatacgggccatgcccccttcttttgtcagaacatccggagtatccggaagtacatgaccgtcgacgaccggacgaaacggaagggatgggtacagagtcatcagttcatcggatttgtccagcaggtcttctgcggggagtctgcgtaactcttcgatagaagaaacaccgcacagttcatagaacttatccgttaccgcctgcgcctgtgctttggtaaataccattggagacggaaaacaggcaatgcttccgctctgaaggatagcctgatggatcatcggtgtggccagcggagaaaatgtgagtacatgtgaactcatggctccggcggactggcccatgattgtgatgttatccggattcccaccgaaggcagcgatattttcagagatccactccagtgcggcaatctggtcgagcagtccctggttgccgctgaaaccaagttcctcttcctgtttctgatcataaaggaaaccaaacacgttgacgcggtaagaaatagtcgccaggatcacaccttttcttgcataagcttccccatcaaactccagttctgtggaaaacccatgttcaaagccacccccgtgaatccataccgctaccggaagtttttcagaagcagtatgtgccggtgtccagatgttcagatacagacagtcttcagaaatcggaaaatgaaagtccgggttatcatagaattctttctgatataaaccgtccgggtcggtgaaatgctgcatggggatggaacggaaagtaaacgcatcataagcttctttgaagctttccggtttttgaggtggtgcaaaacgaagagcacctgtgggaacctttgcaaatggaatgccccgaaaaacagaatatccatctttctgaataccgttaatagttccataattacttgatacagttgttaaagttgccattggataaccgttactgaaaacttataaaaaattataaacttctatgtttcattcctacttcaacgagtatgcttttgatgatataaatatctatctactcacaagttcttgtactctccataggcgtaaattccggactaacgtatccgtacatatttgcattaacgtttcagtgttagcttgcaaatcgttctccataagccttgagatttatagatgcctggaaatctctgtcaatcatattcccacattcacatctataaaccctgtcagataacttcaaatcttttttgatgtttccacagcagctgcaaagctttgatgatggataaaaccgatcagccactataagctgaatccctttatcattgcatttgtattcaagctgttttctaaaccaaaaaaatccttgttcctgaactgctttggataaatgtctgtttttcatcattccgctgacattcagatcttcaatacaaataaatcttggctttcgatttacgatctcagatatggtctgattcaaatagtttttacggatgtttgttaatctgtgatttcgttttaataaaagtttttcctttttgattacattatttgttttacagtagctttcccctttcttatttttctcgtaagaacgagagatactacgctgtaatctgcgtttctgtttttctagtttctttactttctgactcttattgatgttcttatatttgacagcatcagagcagacagccagatttttgattcctaagtctataccaactccatcatcattaagtgtttccttgcagtcaggaaattctacacatacactgatccaccagttcaatccatcaaaggatattctcggattcatatatttaacatctgttggaatacgtccatgttctgcaagtcttacccaattctttttttgcttatttgctttcctgctggaagaaaaaccttcaagcttaacgtgggtattactgaattgtatcttaacgttgtcctgatagaacttcggcatggatctctttctggacttgaatcttgggaatttttgcaaacccttgaaaaagttcttatacgcagtacaggcatctttgattgcctgtttagttacattatttgaaatatttaatagccatgcgtattcatcagaatgtctaagctttgtaaattcttttctgagttctgaatctgaaatgaatttgccacctttttcgtagctttctttttccctggccaaagcccagttataagcaaatcttgaagctcctgcgtactgaaacatcttagttttctgtacgttgtttggtatcaacattacttttatggcttttaccatctgtttcctcctgcagcaattctcggataatcatgtatagaataatatttactcaaagtatcaactcctttcaataatattctactctaatattttataaaccccaacaccagcttatatgattttataatttatatttaactgttaacaacctccctgttatctccgttatgttattttacagaatgaaatgattcaatatataaattactcgtaattgttcagcagcctcacagttatgagtcagaatgctacctacggaataggtacaatttatcataggataaatccgcaaaaagtaccagtagtaaaaatacacaaagatagaaattgagaattgggaaaaaagctgtataaacagggggcaattgaatagtgaaataatttagccagcagaggaatgaaaatttgaacacatattgatacctggagatatgcgaaaaaatcaaattgaaacccatagattttattgattgattcatataaaatgaaacggttcaaagataaagaagataaaaactaaataggaaaatggaagaaaaggtaaaaatgcacaaaaagtaactggtaactttgatcaaaaatcacaattgctttgcgcaagatgttgtagtatagtaaatacaacgaaaggaactacgaagtaacgaaaatgaaccgtttcaaagtagcaaagtgcataaactattttaggaggatatctgatatgaaaagaaaagtagttgcagcagtattaacaatggcaatggcaggaagcctgctggcaggatgcggaagctcttcttccgatgactcttcttccaagagcgaaactacaacaacagatgaaagcgcatcttccgatgacagcaattccgcagacagcgcacgtggagatttcagcggtgtatctatcaccatgctgaacacaaagagtgagatcgaatctcagctggaagctgccgctgaacagtggggtgaactgacaggagcaaaactggaagtttacaccatcggtagtggtacaccttctcaggaagtatctgcaagatacgcagcaaagaatgcaccgacactgatcatgtgtgacccacaggacgttgcttctatctgcgaagaaaaaggcgtagatctgagtgatgaatcctgggcagcaaatggtggtacacagtatggtatcacaggtaatgacggaaaactgtacagcttcccattctgtatcgaaggcagaggtatgatctacaacaaaacagcaatcgaagatactctgggagaagactgggatccggcttctgtaacaaacatggatgacttcgaagcactgctgaaaaaactggtagacaacggtatggaaagcccggtggctctgaaccaggaagactggagcaatgcaggacattacttcacacaggtatatgaagagcaggacggaacactgaccggtacagaaaagattatggaagatctgagaaacggaagcgtagatctgatgtccaacgaaagatttacttctctgatggatacctacgatctgttgatggaatataacatcaataaagcagatccgctggctgctgattacgatgaaaacgctgcagacctggcagaaggtgatgtggcattctggttcaacggaaactgggcatgggcagagatttctgattacattgaagacgatactgaaatcggaatcatgccggtaccgcagaacggaacagaagaaaatgctaacgtaaatgattacatctgtggtggtgctaccaaacaggttatgatcgataaagaatgtaacgatgaaaaacagcaggcagcagcaaaagatttccttgactggctggcaaacacagctgaaggaaacaaagtactggttgatgattgctctttagtacctgcattctccaacatcacagaagaagctacaaatatgctgggacagagtatccagagatacacagtagaaggaaaactgtttgatcagccttctaattatcctggagatcaatggtcagaagttggtgcgatcatgcagaaatatctggacaaacagatcgaccgtgccgaattcgcaaaagaagttcaggattactggacaaacctttccgaataatcaaaaaggcagatacataattggttgctagttaagaagttgccgggcagagtaatgaacactgacccggcaactgctactaaaagagggaaagaaaggcaacgagatgaatagtaaaaaagaaaacttatggagcaaagtttccacgttcctggtatttgcaggtcctgcaaccttctcattcctggccgtggtaatcgtaccattcttatatggtgtatatctgacatttacaagctgggacggcgtatccagcaacaaaccttttgtaggactgaaaaactatgcggcagtagttgcagacagcagcttctggcagtccctgggactgacactgctgtatgtggtagtttccgtaatactggtaaacgtggtcggatttttactggcactgctggtaaccggaaaaattaaaggaaagaatttcttccgtgccggattctttaccccgaacctgatcggtggtatcatccttggttatatctggcagttcgtatttaacaaagttattgtttactttggtgatgcactgaacgttaccgttctgcagaaatccatgctgtcaggaagtgcctctgcattcgcagcactggtactggtaacaatatggcagttctccggttacatgatgttaatttatatcgcaggtctgaccggtgtatccgaagacctgaaagaagcagccaagatcgatggctgtaacgaatctcagacaacaagatatatcgtacttccgctgatgagagcatctttcacgatctgtatgttcctgaccatcaccagatgtttcatgatctacgatgtgaacctgtccctgacagaaggtggtccttacggatctactgttatggctgccatgtatgtatttcagaaagccttttctgcaaaacagtatggtgtcggacagacagaagcaatcatcctgtttatctttacagcggttattgcagtatctcagacaatcatcaacaaacggaaggaggttgaagcataatggaaggacaggaaaagacagtaagaggcatcaaaacgttcctgaaaacactggtaactgtagtgctgtttatcatctatatgttcccgttctacatgatcgtgctgaatgccttcaaacacaaacgtgatattatcaaaatgccattgagctggggtggtaaaagaggttttacaacagataactttgtagatgctttccagcagatgaacttcatgaacatcctgaagaactccctgatcattacctgtgtgagtgtgttcctgatcattctgttctcctccatggcagcttacatcttcgtaagaaaagcatggaagatcaaccagatcatcttcatggtaatgctgttttccatggtaatcccgttccaggtagttatgatcccgctgatctctatctacggtggaacatttggaatcctgaaccacagagcaacattgatattcatgcatctgggcttctcggtatctatggcggtattcatgttccatggatttatcaaaggcggtgtaccgatctcactggaagaggcagcacagattgacggagcaggaagactgagaacattctttcagattgtgttccctctgttaaaaccgaccacagcaacactggttatcctgtatgccctgtctctgtggaacgattacctgctgccgagcctgatcctgacagataaatctctgtacacgatcccgatcgcaaccaagctgttccagggaacatatagcaatgatatggatcttctgatggcggcactggttatggcaatcatcccggtaatcatcctgtatatcgcattacagaaatatattattgctggtgtagttgccggtgcagtaaaatcataataaagcggtactgaaaggtgagtgtatctgaatctgataaagaaaagatacactcaccttttcttatataaacggaaagctgttggggtcaaaaggtattttgccctctttgataccggattgatccgtacttcgtactctcacgaccctggtatcatagaaaataaagtacacaacaatacatagacaatacgataaaataattctataataaaaataattatagccttttcaggtcccgatgaaggacgcgtcttgtcagaaacttgctgtgtcgaacttgagtatctgataggaaggtgtggaggaggaaaatcaaatggtaacaatcaaagacgttgcacgggacgccggtgtatcggtgggaaccgtgtcgaacgtactgaatggaggacgtgtcagcgaagcgaggagaaagctggtagaagcatccatagaaaaactggggtatcaggtgaatactctggcaaagggaatgcggatgcagaagaccgattatgtggttgtcattctgccgaatctgatcaatccgtattttgcactgttgctggatgccctggaaagcgaattgtcagcagtcggaaaacaggtactactatgcctgtccggtgatgatgccgaacgggaagtggcatttatggatatggcaaaacaaaataaagttgacggaatcattggtgtgacttacagtaaggtagaagaggaacggatcgaaaacatggcttttgtttccatcgaccgtcattacaaatcacacatcccatgtgtggcaggagataactggcagggcggctggcttgcagcagagaatctgcataaaagaggatccaccaacctgttgtgctttatgacaatgtcatccgtagacagtgaagtacgaaaaagaagagtcggttttactgaatattgtatggaacatgatctttcctgtaatagtgtggaaatgtcagaaaaacagattgtttcggtctatgaatcctacggatccagaaaactgatccacaatatgctgcgggcttatatttccccgtctatgggagaacattccatcgatggaatctttaccagttcggatcatcttgcaatgatcgtacaggaagaactcgaagagatgggaaaacgggttccggaagatatccagattatcggatacgatggtctgcagtttttaaatcaggggaaaccaatcgtatcgagcattgcgcagccggtgcatgagattgcaaaagaggctgtaaggtgcctgaacgaactgatcgcgaatggaaaaacagaaggaaatacaaagattccggtgagctttcaggagggaccgacaacgaaaacgcttgtgacagaagaaaaataatggaggacttgagatgataaagtggctggaagatgcagtgttttatgaggtatatccacagagtttccgcgacagcaacggagacggaatcggggatatcccgggaattacagaaaaattagagtatattcaggaactgggctgtaacgccctgtggatcaatccctgttttacctcaccgttttacgatgcgggatatgatgtggaagattattatagcgtggctccgcggtatggaaccaatgaagatctgaaaaaattatttgaagcggcacaccaaagagggatgcacgtacttctggatctggtgccgggacataccgctgtgacacatccgtggtttcaggaatcgatgaaagcggagaaaaatgaatataccgaccgctatgtatggaccgacagtctgtataaacgaatggaagatgtcaaaggaatcgtcagtgttctgcgtggcatctccccacgtccggccagctgcggcgtcaactgtttttccacgcagccggcgctgaactatggatttgctaatattaccgatgccggctggcagcagccgaccgatgcgccgggaccgatggctaccagagaagaactgaaaaacatcatgcgtttctggctgacacttggctgtgacggtttccgtgtggatatggccggttcgctggtgaaaaacgatgaagataaaaaagagacgatccgcctgtggcaggatgtgcgggcatttttgaataaagaattcccggaagcggcgctggtatccgagtggggaaaaccggaggtggcactggaagcgggatttgatatggacttttatctgcattttggagataccggttatatggatctgttccggggagatcatccttattttggtggagatccggagagtgatatctctgtatttgcagggatctttgcaaaaaatcaggagaatctgcgggggaaaggcatgatgtgtatgccaagcggcaatcacgatatggcccggatctcttatcagctggatgaagagcagatgcgtctggcctatggatttatctatggttttccgggagcaccgttcttatattatggcgatgagatcgggatgcgttatatcccggatatgatctctgtggaaggcggttacgagcgtaccggttcgagaaccccgatgcagtggtcgaagggagtcaacggagatttttccagtgcaccgtcccggatgttatatatggcgatggatccggacaccgaccgtccggacgcggaaagccagatggcgcaggaagacagcttatatcactggatccagcggctgatcgtactcagaaaagcgtatccctgctttggaaatgacgggtatgcggaatttgtcaaagcggaaaaaggatgctctccgatcgtgttaaaaagagaaaaagaaggaagctgcggatacgtggtgctgaatccgttcgatcagccactttttgttgaagacttcggcatcgatcagaccgaacagctgatctgccgtggaggggcaccgaaaaagacagaagatcatcagctggagatcgctgcaaagagcatggcctggctgcttgtaaaataaaaggaggaatgaaatatgccacagatgcactgtaattttttttcctactccctgggacacggagtagatcttacgatcaccctgccgggggtaagtccctgtgatatggatgatccggctttattaacacatcagatgccggaaaaattcccggtgttatacctcttacacggccatggaaatgattatctttcctgggagcgttttacctgcgtcagccgttatgcggaagagtaccggatcgcagtagtctcggtatcggtaggaaataccctgtacatggataccatctacggagaaaaatactatgaatttatcggaaaagaggttccggaattcgtgaaggcatatttcccggtcacagaccggccggaacacacgtatattgctggtgcgtccatgggcggctacggagcacttgtccatgcgatgaaagataccgagcagtatcgtgcggtcggtgctttttcaccggcaacggtatgggcgaaagatctggaagaaaaagtaggccataagttcccggaaccgatggatctgtaccagatcatccgtgacgatgtggatgcgggtaagaagctgccggatatcttcttctgtgtgggaaacaacgatttcctgattgaatcggtggaccgttttgaagaatatctgaatgaattaaagatcgaccaccgctttgaccgggtggatggttatgaacatgaatggagattctgggagctggaactgccggaattcctggactggctgccgcggaccgacagttacgcgaaaatgggtaaacataagatgtaaaggataccaggggaacaatccggtatcatatgacaggaggaactttcatgaattttgatgtattcgagaaaaaagcaaaggaactgggtgttctgggaatcgttgtgacgaaagacggaaaagaaatcggcaagaaactgtgggatgagcagtgcagaagaaatgtatattctgcaagtaaaagtttcacttccacagctgtgggaatcgcagtaaaagaaggtctgctatccctggatgaaaaactggtggactgttttgatgaagatcttccggaaactgtcagtgacaatctggcaaaggcaacagtaaaagaccttctgaccatgtgtctcggacaggaaaaagcagaactgatgggtgcacagcgtccggtttatgaggaagaggactgggtaaagatgagtcttgccttcccgtttgtctacgagccgggaacaaagtttgtatacaataacgtaggtccgtatcttgcaggtgttctggtagagcggagagccggatgtgatctggtatcctacctgtatccgcgactgttcaaaccgctgggcatcgcccgtccgacctgggaactggatccctatggtcatgtcttcggtgccggcggacttttcctgacaatggatgaacttcacaagcttggcctgctctatctgcagaacggaaactggaacggaaaacagctggtaccggaaagctgggtaaaagcagctaccagcaaacaggttgaaaatgatgcagacagcttcggttacggttatctgttctggggcggcagagaaaacaccttccgcgccgacggaaaatattgccagtggtccatcatcagtcgggagaaaaacgcggttatcactgttatcgcagaatgccgcagagaccaggaactgatggatgcagtgtttacagaggtatttccgcaggtataaacggatacatatggaaaatgaaaggaatcaggaaaacggagagcgttttttgcttccttttgaatatataatagaaaatcttacaacgagtccaatgctgaactattttaagaatagtattataatcacagtaggagttttaattccgttactgttgatcagttttatggcagggtttgcgttgagtaagatccaattcaggggaaataagaagattttgtcttactttttacttggattgatgcttccgtttcaggttgcattgattccgttattcactatttttagtaagctgggaatcctcaacacctatccggcagtcattttgccacagattgcgttctctctgtcatactcgattcagctgtattattcattcagtaaattcctgccggatgagattatcgaggctgcaatcattgatggttgttcaccgatgcggacatttttcaagattgtatttccgatgtcgacgaactcgctgctgacggtagcaacgatgcagggtgtctttacatggaatgattttatcaatgcctatacgtttacgagatctaccaatatgaaaactgttacgttggggctgaacgactttgtcggttttatgggaactacagactggggtgctacatttgcggcaattaccgtcactgtgttaccgacatttttgttttatttctttacgaataagtacatgctcagcggtttgaccgccggagcagtcaaaggataattttatatgcctgcgggcaggaaagagaggaaaatcatgaaaatttattatcagcatccaaatacctggtttggcgattgcatgccttttggaaaggatgatacattctatctgttccaccagagagataccagagtcccgtgtccttttggagaaccatttggctgggatctggcaaccacaaaggattttgtgacttatgaggattgcggtgtggcgattccgagaggaacggatgaagaacaggatcagttcatttttgccggaagcatctgtgaagacagagaaggaaagtatcatgcgttttataccggttacaacagagattatccaaaacagggaaaaccatctcaggtactgatgcatgcggtcagtgaggatctgaaacactggacaaagacgcaggatgcagtgacctttgttccgcagccgggatatgatccggatgactggagagatccgtttgtactgtgggatgacgaatc

SEQ ID NO: 650 - DNA, 17923 bp, Oliverpabstia intestinalis
  source 1..17923: mol_type = genomic DNA
gcaggttacttcctgccacacggatcttcaggtttttcatatcttctacggatctgacttcctgtctgctgttggtcagctggcggaagccgttttctgcaattcccatacagtggagattgtattcatccagaatagccttcagtttttctcctgcttctccgtcaagttttgcatctgcatcttctactgaatcaaacaggaacggtagagataccacattaaatctcggatcaaaagcagaatagatcaggttgctgtgcatggaaatctgtaccggatctccgttcatcagagcctgaataccttcggactggtttccgttggtcagctggtctgctgcgtagacgttgacttttactttacctccggtcgccttttccatcagttcaccgaattttcttccaccctctgcccaggtactggtttctgtggtggaacaggtgaagttccaggtctgttcttcccagccaagatcgctgtaatctgcgatgtcattataagaatctccggaaccaccggtgctgtcttgtgcatcatctgcactgtcagaagaagccgttaccgttccgctgtaagcaccattttctccggccagcgctttcggcaagaaggtggatattccgggaatataggtgatcagtaacagtacaaccacagacgctccgatcatcggcataacggccttggaaatctgctgaatggtaacttccattccttttttcagtttgacagaaatcgcaacaaacaggttgacacctaccggaggagttacctgtccgatggccaggttgacagttgccacgataccaaatgctacgacatcatatcccagtgccttacataccggcagcatgatcggaataaagatgtacattgcagagtttgcatcaataaagcatcctgcgatcaggaagatcacattgacgatcagaaggaatacaaactggttatgcgctacgcttccgagcagatcggaagctgcctgtgcgataccgaatttggtacatacgaaagagaacagggaagcactcgccacgatcagcatgataccaccggttgtcttcgcagagtctaccatcagctcccacaggtctttgatcttgatatctttataaataaatattcccacaaacagaccgtacacaacagacacggcagctgcctcagtcggtgtgaaaatgcttccgtagataccgccaaggatgataaccggcatcaggaagccccagaacgcatccttgaacgcatcccagcgttctttgccacttgcttttttctgtgtaggctgaatattgttttttctcgcctccagcataacaacgatcaccagagcaacacccatcaggataccgggaacgatacctgcggtaaacatatccgcaatagatacacctgtgatagatgcatatacaacaaatgcgatacttggcgggataacgatcgcgatcgaactcgaagttgccatcagtgccgtagaaaacggtgcggaaaatccgccacgctcgatcatcgccgggatcagtaccatacccagtgcggcaactgttgccggaccggaaccggaaattgctccgaagaagcaggctacgataacacatacgatcgcgataccgcctctggtatgtcccacgcaggtatccacgaaacgaatcagacgtttggaaataccggcttttgccatgatattaccggacaacacgaaaaacgggatcgccagcaacagaaatttgctgataccggaatacatattggtagccacgatcgtcagtgaagtaccggagtacaggatcgcgcagatagatgataatccaaggcagattccgatcggaataccaaggatcagaaatacaaaaaacgaaacaaacaatactgcacttatcatttttcctgttcctccttatcttttttactctttgcacaataatcaacaaaatactcgattatatgaagtaccatgcaggctgctccgatcggcacgaaagaccagaagatccattccggccagttcagtacgaacgttctctttccgttctccagctgagtgataactttatccagaccatatttgaacagtacagcggtaaatgcaacactcagaaccgtgttgatcgtcagcagcactttctgtcctttcacagacagtctgtccggaatcagtgacaggttgaccagttctccgtcacgtgcggccaaagctgcagccatcagtgtgatcagtacaaataccgcaacgacaagttcttcggtaaatgaccaggactggtgaaggagcttacgggataatacattacccacagtaagcaccacaatcaggatcgtagcaaggacaagaatcagcttttccaccatagctacgccattcatgatttttttgtacgttttcattacgcatcctcccttgttttttgactagccgtatcgtgtcggtttcgttttctttcaggtgtttttgacaattatgagaaacacgctctgcgagtttctcaagtgatcgcggcagtcgccaaagtctcgtgcaagcacggactttagctcgttgttcacataaaaaaaatccgtcccaaactagggacggataaaactattccgcaaccaccctgtttcctccttgaaacaagcacgaatacaacgcaccagcatacgcggtttctgtaacgggaaacgcccgtgaaagcctattcgacacttctttcgactttccttctcagagatgatcttcaaagcaggaaggttactgtctctcagcaccgacagctctctggaaacgcttacactgtttctacttcttctcttcactgaatttctttcttatattaccacgttaaagtgattctatctcatttttccgagtacgtcaatatatttatatatattttgtttattttttattttgcacctaatatatatttatcttttatggtaactgttcagtaccttcacagttacgagccaaaatgccatcaccttcggtgatggcattttggcttgtatgtctcgggattttgacatattcatgtcaaaacacctcgcgggacagtggctactgaatagttaccttttatgcaacatttcccttgccagtgcaaaagcttctcgcacaagataatggtacagcagtacactcttacacggtgcggcaataccacatactctctgatagccacttcgtcttgccagaagaacactgcggtatacatgaaaattattggtaatgattccaatctcgtcatgtcgataatccatatatcttctgctgtatcgaagattctgtctggttgtggtggatctttgttccaggatcagacgttccctgctgattccggctttctccagatatcgtctcatacattctgcttctgaaatctcctccatttttccctgccctccggataaaaccgcaatcgtctccggatttgcctgcatatattcttttgccgtatccaaccggtcttttaatgctttgcttggttttgttcctttcacctggcatccaagaacaacgatataatccagattctcaattccttttgctttcattccggtaccgatttgatgttccagataaaaaaacagtaccagccccgccagaagacaaactcttacaatcgcaaccaatgcacccggtacaaagaacggaacaccggcaactgcacatccgatccggcaaccgccccataccatccatccaatacctgctgccagccagatccacaatccggacacccgatagccggcatatcggacacctgctatgtaatacaaaatacatacgattcctaacaggctcgtaataatacccatacatttctcctatctttcttatatatggctccccgttatcacaacggtcatcattttccctacagacacgaattatcaccaacgattcacataaacgagaaaagagcgggtagtttcttttctccccgctcttttacatttttattatcttccgcaacagaatttgtattttttaccgcttccgcatggacatggatcatttcttccaacttttgcacctttgatgatcgtgccggatttcttctgttccatatacagagttttcttcttctccggtgtaaaaatttcatcccacatcggcagttcatacagccagtctgcttttgcatctaccatgtttttgtaaagcagctctttatcaaatcccagatttacttcggtatcttcttccatctcttcgatcgggttctgaaccttcaggctgtcattgataccatccaggaaacctgtcattgtcattacattgactttatatttatctgccagttcctttaccgttccacgtactacttcgtccggattggaaagcagctgttcgtagattcctttttcaattacaaaatattctgcccaaaatttctgcagttttgctttatctgcctgctgagagtatgcaacatctctccactgttttaataatcccatgattactgtaccttccttcaactcaattggtaattatactccacgggtccactactgttcgttcatattcttgcagtagttctgggacttccgtgtgactctattaagtatatacgatataccacagattttcaagcacaaatcacgttttctcgtactcacctggcatccagattattgttcactccattctcggtaacacccttcgcgctgcacagaatttatgctgatcgcatgaatttgcggggtgtgtctcggcttttttgtgaccttcgctcacaaaaaagtgagtaccgaaatcttctttacgattcgatactcaccttacattgcaggctctatcattggataacctctctttcttaaattataagatgaatcataaactttctggtggtctgtacctcctgcttttttaatgggataaatccttactttctcattggactatacctgactttcttaaaatttgtttttgaggtgttactttaggttttcggtggtccgtaccttcctttcttgaaaattacatctggagggatgttgcctttgaactttacgttaagtttctggtggtctgtacctctctttcgtaggttcttttgttttgttttcgttcttttcttttgttgagtatatagtaactcttctttcttattttgtcaatacttttttataatttattttattcttttaaattttcagaatcttttatcgtttaagaacatttttactcatcatctgttctcatccaatcgctttccccgctctattcttattctcccccagccaatgctcagaaagggagcgcaggcaggacggggacagacagccttatgctggtgcttttagccaaaataaaatccatcgtttacggaaacttaggctcgagcgctctcgcgagagtcttagttgcagttaacgattagtttattttggcgttaccagcggttgtccgtccccgtcctgcctgcactccctttcgtccgagtagccaaagcagccaacagtccgagcagcgacttcatctcttatttctggaaagccttcactctctcctgaatcgtaacattaaaattctccacccgtctctcataagtctcatccataaatttcgacgtcagcagaaaatcagccgtagccagattattcgcaaccggaatatcataaaccactgcgatacgaagcagtgcccgtacatccgggtcatgtggctgtgcctctagcggatcccataaaaacaccagaaaatcaatgcctccctcaacgatccgtgaacctatctgctgatctccgccaagaggaccgctgcaataccccttcaccggaagccccgtcttctccgcgatcagcttcgccgtggtacccgtaccacacagaaaatggttcttcagcacatccttgttccggtcacaccactccaccagttctttctttttaccgtcatgagcaaccagcgcaatatgctttgtcttctccatagtaaaaccgataaacttctcatttgtcataaacattcctccttctttcatggatttccttaatgataatctcttagaaaacggctggaaagcgtcgttcccgttccatacaggcactgatacagattctccagaatagcgggtgtctcatccagtgctttctgatacagttccatcagacgtgtggttgactctctgcaggcaggattcgctttttttcgcatcacctggccttccagaatatcataacatccaagtacatgcataccgccaagtactaccttttctttcatcggattcttgcaggtcagaagcctgtcatacagcttctgcccctccagtgcccggtggatctgctttggtgtcaccgatggaaacatccgcgcgatcactctgcagttttcctccgaatcatccaggacacttgccggaaggtacaccctcggctccttaccgctctcaatcatcagataacggtcaagttctgtctcgatctccgcatgagagattcccgtctgcttctcaaatcgtcccacatacccgtgacaggtactgtccagcataaagtggcaggcgaatccaaacagataggatgccagctgcggcgacgggctgatttcaaattcccgtatccccttctgaaagaatccaaacgccggttccttatgcatctgcggacctattttattaattctgctttgtggcagacaaatcggtttatagtaaaagaaaatatccggtccgtgctgaccgatccgataaacaccctttcctttccgaatcactgccttgatatgctccggtaattttttgtatacatcttttccaaacttgtcatgtgtatatgtcgtcggcatatgtatcgtccccttttttcactttgggaaatgctcccattatttattatcccctgtgcctgttcaacagttatgaattgcaggttaaattctggtaaattcacattttttatacaccctgtgcaatcaccttcacacaaatcattataattctttttacttccggaaacaaggaatttcaatccgaaaaaatccgaaaaattctgaaacttttgtgtttttttctgaatatcttctcattttccggtcatactataaatagccggtggagagatgacacaaaggcgtgacgcttttcattggcccgaaagaaaaactgtgccggatcccccctccggcccgaaataacgaaagaagagatgaaatacttatcctcccctttataagctgtcgccttctgtgcggcagctttttttacatccgttaaaaatagcggccgctcaatgcgaaaaaaatgaaccgttgcctttcatctataatagcactgtctgctgcatcccccggggaaaatctgttgtttcatctgtctgcaatattccgcttcgctccccgctgttttcagtattgtcagggatttgtgaagattctgaatatctgctttcatatcctcgctgtggttgccacgacccaccaatttcagatgggtgattccggctttctgcaaccggtacagtgcacaaagtccacatccaccggcaccgcacagatagtcatccttctccggaagactctcttcttttcggattacttccagccgattcttccatccgggatcttctgctttctgcgggcgcagccagtacggtacacggcaaagatgtccaagttcgtcacagtgcagggaattacagaagcttccggaaaactggcacagttcgttcaacacaaaggcttcaaactccgtcccgctccttttttctcctgctgttttccgggccgcgatcatggatgccatatcttctatcgtattctttcggtgaaaaatcatacgtttgagatccagattctgaaaggtttccaacattttcctgttattttctcccgtctccccgctcagatggatctgacagtccaccctctgcttccgaagatacacgatcagcgccggatccgccagaataaaactctgaaagtcaagttccatacagcttcggatgatatcttcgatcatcggatactgctccgggatgtaatacagggaattaaaggtcagatgtatcggacgtttatatacctcacgcatgccagccagaatctccagttcactgtaagcgcccagctgcacctgataacagagtacttcccggcggtttaatgccagcgtggttccgtaacgtttcgtccatgtatagggcacatacccgcagaagaattcatccgctcctgcctcgcaaaataacggataatcgtcgatgcatcccagtcctgccacaattttcatacgcatgccctcctacagtccgatcaccagacggtcgatacctgcctgttgatatgctttcagctgttccggatgctttacaagttcctcatccagtccgaacagggaattgtaacgtcctgccatatgcagatgttccgggtaaatatacgcatactgttcgcagtatcccggacagctttccggcagccgctgttttccccgctcaccctcggtacagctcgcatacagtggacagtactgcgatgtattggtctgataatacggcagatgcaggctgttctttccctgtggaaatacctgcggatagccacagctttcccactcatagcggttgatcccgtacgtgtcttttaagaatctccgataaaaaccggcctgcagattattttctcccagcccgcggatactgccttttttatagtgcatccgcggatcttttttctgtttgttcaaaagtacaccgagacagggttccagatattccccgttttctctgaccagcgctgccattccccagtcattgacaagaatttccaccctgatctgccgtttttcacaccagttttccacttttttcaggagttttcccatctcttccacctgaaactcccgcatacagggaaataccagggtgatacccacgttttccacatttgctttctccatcagagcaaacagctgctcttctccgggcaacagcagatggcagaatgcattgccgatatacagacgatccggaatgattttatgctgttcccagcctccgattccgttttctttccagtacagttcggtaaatttttctattgtatttcgctcatacaggttataccatgttcttcggtcgagtgccagcgcgagttccacgccccgtaccaccggccggatctgcgcaccggaaaaccagatggatttctgctcttccatactctttgcatggatctcgtcctgattcacaggatagttgcaggtgatctgtgccatctctccgtccgttccctcgatccgtgcccgaatatatccggtgtattcccggaaaagtttctgtactgcctgtacataatcttgctggaacacctcgacggtataacttacataccactgctcctgccttttttccatgaaatgataactttctaactccacttcccggtacatgctttcagataaatcatagaatccgatccgtatatgccgcggtctttccacctgttctcttacccgaaagcaaaagctttctgtggaaatctccgtgatcctcacttctttgtcatcgacaaatcctgccagaagtccgaatggaatcatctccacactctgcatcccgcatcacctcctcgtctttgcgtcagatattttttctgtctcgtgacactaaaaaagatccaccggacctttttgtcgtatgcttggcaactgaaaaaccccttagtaacgttccttttgttccgttactaaggggtttccttcacatctattcgctgatacctctgtttgttttaagcgaagaatttgtcatagatgccataaccaaagataaataagatcatcagcggcaggatgtaagacagatacacacgcatccactcctgcatcttgaaaccttttcctgtattggcttctgctttgaagtttttccagccccatccgtaacggctggtacaaaacagcagatataccagggatcccaatggcagtaaaatgttacttaccagaaaatcttccaggtctaatactgcaccgccgaagatggaaaatccatcccagctccatacattatatcccagaacacatggcaatgacaagaggataatcccaaacagattcacaagactgctcttttttctgctccatccggtcagttccatcatacaggatataatattttcaaaaactgccagtactgtagagaatgccgcaaaggtcataaaaataaagaacaaacttccccacagtcttcccatcggaatatggttgaagatattcggcagggtgataaagatcaggctcggtccggatgttggacttactccgaaggtaaagcatgccgggaaaatgatcagaccggatacgattgccacaaatgtatccagaatcgcaatatttgcagattctccaagcaatgatctttcctttccgatatagcttccgaagattgccatggctccgataccaagactcagggtaaagaatgcctgattcatcgctgttacaatggtataaccgatacccagttctttcattctttcaaagtccggaatcagataaaacttcagaccttctgccgctccgtccatcatgatactgttaatcgccagcactaccatgatggcaagcagtgcaatcatcattacttttgtgattttttccagaccattctgcaaacctctggaacatacaaagataccaatggccactacaacgatcatccagaaagccataacaagtggctgtgacaacatctcattaaatacgccgccgacctgatctgcatcaagtcctgtaaacttaccggttgctgtcagataaaaatagtgcagcatccatcctgatacagttgtataaaacatcatcagcagatagcagccgatcacggtgatgtagccgtggatatgccatttctgccccggtttttcaagtgcctgataagcttttaccggacttttctggctggctctgccaacggcaaactccatagtcataaccggcagtccaagtatcaccagaaagatcaggtaacacagtacaaacgcgccaccgccaccttttcctgcaatataaggaaatttccagacattaccgattccgatggcacatccggcagatatcaggataaatcccatacgcgactttaatttttctcgttccttcattcatctttctccctcatacagatttttacaaaatacgtaactgttcagtacctcgcgggacagtggctactgaatagttaccaaaatactaacagggcatacaacaacagcccggacagagcatattcatgcacaggcactggcagcaccagtttcccataccttctcccggtttctgatagccgtatccggtactcatattctgataccactgtccctgagactgcagctgctgataaagtctctgatacatcaggttgcccggttccatctccatcgctgttctggcatcctccatagcacttgctgtatttcccgctccggcacttgcaatggcatgataataataccattctccatttttttcctgcatcctttccaggacatttaaagcctcccggtaatgaccggcattgatatagttcgcagctgcacgcatctccatggaacgctgatcatcctgtgtctgataccctccggactgataaccaccgtaccaggagttttgagaagttccctgttcccgttccctcacgatctgatcataagcctgctgtacctgtttgaacatctcttccgcctgctctttattgggattattgatattcgcatccggatgatattttctgcttagcttccggtatgcttttttgatttcgtccatgcttgcatctcgtgatacaccaaggacgctgtatggatccaacattccttattttctcctcgtctctttttcccgggactttattctgtcatattttgtccagataccagaatacaatatatttcgcaaaatgtccacatattctatgatcggaagtttttcaaattggcgggaagcttcagccgcttccatcatcagaatctgtctgacccggtcatcaaagtctttttcctgtgcgatcggcttccatgggttatagtttcctttttttctgtctttttcaatatcctcatatgcatccatccggtagatgaatcttcccatggcacaaccgatctttcgcattgtatctgcccagacatcttctttccagacatagatttcacccagcatctctcccgtatctgctgctgccctgtcaagatccgtacttgcttcctgctcacatgctttcagcttttgcagataggtttcgattgctctcgcctgccgcggatatttttcctttaaacgttttacgtctttttttaatgctgatgcaagtataagaggaaccggttttttctcgtcctcccagtcgtctaacagattataataactcaacagtacattcatatccgccgcataggcagtccactggtttctcagacagagatgctttttgaacggatgcatggcacagaagtgttcttcccgctttgtttccgtctcatacaggccggtcagcaaaattccgagaaaggtcacatcatacgtcagagtaaccctggaagtttgtccgtgaccttctttcagatcctggcagactccgcagtaaaatccatgatagatccgatagtctttgatcttcatttcttccatattggttgtaacgtagccaaacatcctccctcacctcttttctttgtttgtctgtttatgatctgttcatccacttcataaaattaatcaggtgcgtttgataaaattacagttgcaatttggacagtgaatcgatatttttccttttccttttggtacccggactttttgtccgcaggtcggacatttgtaaattcgatgggtgctgtctccgtgacttccggtcagtttgttccattttgttcttactttttcacgtgcctgaatataatgctgattttcctggtatctcgcagagatatctttggaaagaatacgatagtaatcatagatcaatacgagcagaatcagcagggaaaagatcgaacttctcacaaagaaggatacgagcagaagtccaaacagcagatacatcagaaatcttcccagttcatctattcttccgtacctgccctgcataaatcgatatagtttgtctctccagttattcattgttttctccccgttctttttttactgtcaccacattctcagccctttctcacatatctgtacagctttctgctttttcccatgcctccctggcaaatgcaactgcattctgtatatctgcatcgtccgggtgcagcaacgctttatcaaagtttcggatcagcatctgtgctttttctctctgctccggattctcttccatgacttcataacgttttcgtacctgcatcggcatctttcccatgcagagaaaagcccccagacagctgttgtctttcggaatccactgttttacattttccacaattctgtcatagtattcctgactctgcccgaatccgcaggtgccaaacagtgcgatctgcctgttatgtacttttttcagaagttcctgcacttcgatggggcagtctcctttttccacacaaaatcccacatacaaaagatggcttttcccaggttccgtattgcagttgatttcctcgatatctccgttaccaagctgttgtaaactctgataaatacaaactgccagccgctgggtgtttcccgtgcgactgacatacatgattttataatctaacatgatattgtttcccgcctttccatctgccgcttttttaatttttccggtattcgacatctttgtttcagatgtcgttttgtcaacaggtttactgtatactactttcctgagtattacaaggatcggcatctaaattttttctaaaatttttgttatgtaagatgaaggagtatctttataaaatacatgttatgttatttcattttactttccgttttctcttttcagcaacgtttccaggtctttttttgcctgttcatggttctgaaacagaatgccgtggatcccacaggctccggctcctgcgatgttgtcttcccggtcatcaaagaatacggtttccctgggattgagttgatacattgtgcagagtttttcataaatctctcgatccggttttgccattttataaacataagaaaacaatgttccgtccatgtagggcagaaatttcatcttgtggctggacagctgatacgtatgctccgcatagttcgacagaatatacagatggtatccctgttctttcagagtttttacccaatcttcagcgtatggcatcagttccaccacgtcaccaagattatcatataccgtctgcacttctttttttaatcccggtgcatttttccgaaagccttcccagatttcttccgttgaaattatcccgcggtcacctgcttcccacagcgtactttcaaagatcgccttatggagagtctgtactgttttttctgaaaatccaaggttcttcagatagttttccggagtgtaagacatcagaacctgcccgacgtcaaaaacaatattttttatcatgtttccctttcctcttttctgtgttttattttttactttatttgtttcggtttttcagataacggtagatcatcatgtaggcatacaataataccgggacgatgatcgttgctgcaatagaggctttgaaccagccaatggagttttcacttccggagagggcaaagatcatggtggaggcatagagggccagcaagaggactacgccgagaattgccaggatgcgttgtagttttttcataggaatctccttttttgttttgcttcttttattatactggtttcttatcggaaagcaagaggagtttcaaaacggacgaagtggacgaaacggcggggcagacaaccgctggtaacgcaaatctgagctaagtcctaagaagaactatgtgccagttcgcggagagccgctcactgtcaagttcttctaaggactggatctcatctttgctaaaggcaccagcaaaaggctgtctgtcccgccgtgtccgcctttccacttctggatgttggctgatttttcatatatgtctccggatcgtttaaccgtatatcgtggtcagcttttcaactttttaaagtgttgattttcaaatgttccagtatcttgttagactggttcgtagggatattcgtggtcgcatttggactggaattctttgaggttgtatattttgttgttttcatcgaactgtgcgatggttacgccgtcaaatgctccctgggtgttgcagtagttacactggaaataccattcgataattgctgtgttccggctgatgtagatttgtttgacatcccatttctgtacggttcctttttggttccagtcgtggaaccactgttggatctgccggattccgtggtactcgggaccgtagcactcgctgtagatgatatcttctgcaaatatatcggtcagtggtttttcgtctttgttcagccagcaggtaaagtattttcttatgatttcttccattgttttctctcctctttgttgacctcgcatacatacagggtttcttcttctacgcggaacttgatttccagaccggcgaaggggaagccgtagattctttcggggtcctgctgataggcggggcggggatccagagccaggatctggatcagggatttttgttttgattgcggaactttgttcaggagttccggcgggaattgtacctgaaggtggtcgtcgcggtgagcggttgcgaaacttccacgtgcttcggggtggctgtcggcataagggatgtagggtttgatgtcgtagatcggggttccgtccagaagatcagcgccctggatatggatgaccggaccatcctgaggattcaatgtaacgcctgtaagctgcacactggagagtccgatcgggtttgggcggaacggggagcgggtggcgaagacgccgactcttgtgtttcctcccagttttggcggacgcacggtcggggaccattcttttcggattgcctgggaaaattcccagatcagccagaggtgggagtattcttccagccctcttacggcttccggattctgatattccggatagaaatggatctcggcttcaaggtctgccagaccgctctgccttgggattccgaatttgcttgtaaaatcactttttatataagcaaccggacgcattatgcgcccggttgtctcgttgcattgcatatcaataatttggttgttattcatatgtcgtttactccagatttacttttccacattttttgatcagtactgccagcacgatcagttccagtaccaggcctacgatcagagccagccagccgtttccggtgaatccaccgaccagatatccggccaggcagcagcctgctaccgtcatagcatacggaatctgtgtggacacatgattaatatggttgcactgtgcgcctgcggatgccagaatggtggtatctgagatcggagaaatatggtctccgcatacagcaccagccagtacggctgccacgttcagtgccagtaaggatacgttgttggtattgatcacggctgttacgatcgggatcatgataccgaaggttccccaggatgttcctgtggagaaagaaagtccaatcgctactgcaaagaacagtgccggaagcagtacaccgatgacagcgtttccgcttaccacatttcctacaaaatttccaagtgccaggtaatccgcggagcagataccggacagagtccatgccagcgacaggatcatgattgccggtgtcatggctttgaatccctgtacaaagctttcgcagaactgactgaaggtaatgatcttccgaagcagatagaagaagaagataaatatcagtgtaaagaaagatccgagtaccagactcagtgaggaatcacagtctgcaaatgctgtggctactcctgctccgtcaagaataccaccggtatacagcatcgcgctgatacaaagaacgatcagtacgatgatcggcaggatcaggtcgatgacttttccattgccgatgattttgatttcttcgtctccgtctgcggtttcttctttttttcctaccaggtctgcatggtattttgccatcgcaccgtaatcgaagtttttaccgatcaggatgatcatgaatacgatggtcaagatcgcatacaggttgaacggaatggtttttaagaacagtgagaatccgtcaatcgcgcagtcatccggcagggaggatcctacggctgccgcccagcttgagatcggtgcgatgatacagaccggtgctgctgtggcgtcgatgatgtaagccagttttgcgcggcttactttgtatttgtctgtgaccgggcgcataacggttcccacggtcaggcagttgaagtagtcgtccacaaagatgactacgccgaggagcatggttgagaacagcgcacctctctgggatttgatttttctggatgcccagtctccataggattgagaagcgcctgattttgtgatcagggctacgatgattccaaggaataccaggaagagcagaatattcacgttgtcgccgattttccagttcatgacttctatcatggtctgggtggcggcaaggatgtggaattttgtaaagagcagcgctcccgacagaattccgatgagtagtgacaaatagacttctttggtccatagggccagggcgatcgccacgataggcgggactaaggcccaaattgttcctgacatgtttgtttcccctttcatgttggttttaatttttatgtttttcggttaattatagcatggtaacgtgatggtgtaaatgggtattgtacaaacggatgaagagctagagggtgtgggctagacggatgcagagcaaagttgtatacaaggcggacgcagagcaagacggaacgggcaggggaa

SEQ ID NO: 651 - DNA, 1150 bp, Oliverpabstia intestinalis
  source 1..1150: mol_type = genomic DNA
tcatccattttatacttccagtgataaaccacgggttcacggttcacttcgtcaaagtacttgtaaattcgttcttccaactcctgtttggtattgacacgaattcctcgaagcatctgtctggtcatcttgctgaagaagctttcaatcatgtttaaccatgagccatgttttggtgtaaacacaaatttaaaacgtccctttggcatagtatccagaaagcgccgtgtttctttggaagtatgtgcagaatgattatccaggatgatccgaatggtatcctgtgatggatattttttgtccagtatctttaaaaactcaataaaatcagaactcttatgggtctcacttactaacggaattgcttctccagtgagtaaatcaatgccagccagtaaagagagcgttcccagacgtttgtattctgcatcacgatatacttccccatgttctgatgtcgggcgtaaatccggtaccgtattggagattgcctgaatgcccggcttctcatcatacgataccgtaatcgtcagtttataatcgtctggaacaatgagatcaccattttcatcaaactgcatttcaatctgcttataaaccaacagaacctcatgcatttttgattcaaaatcaggatcccgtttttcacagtaatatttgattttaaagggtttcatatcctgttccttaagaaatttctggatatacggtttggtaacggttgaaagccttggatatcccgcttcttctgcatgtttctgaatgtatttgtggagagaggtcaacgtccacaattcctgtgcataaccgagttctgtcggtctctgacacgcaatatgaatcatccatgcttttgcatcatcagtgatttccgatggacgtccaggacgctgaacatcaaacagtgcagcatctaaaccgcctttctgaaacttcgaaatacaaaggcgtaccgttgcggtactaatggcaagtttatcagcaatttgctggaatgtcattccatcggctttatataaaaggattctggcacggtccacaacttgtgcctgaatggttctctttttggataatgctttaaggtaatctctgtcttcatctgacagaggaagatatgtttttctcatagtgttcatcctttcttagataa

SEQ ID NO: 652 - DNA, 869 bp, Oliverpabstia intestinalis
  source 1..869: mol_type = genomic DNA
gcaggaagtacagccatactgctccctgtggaatgcaaactatgactgtctgttcttctgtatcaatggtgatatctataacagtctgacaccggaacagcaggccgttgttgacgaagcaggacagaaagcggtagattatgaacgtgagatcaaccgtgccggagacgacgagatcatgagccgctggcaggaagaaaacggcgtgacgatcaccaaaaatgaagacatggatattgattctttcaaaaaagcggtagacggtattgatgagtggtatcagaaagaactggaaaatcagggatatgatgatgctgcagatttgatcgctgcatttaccagtgatgatgaaagtgcttccatcggaacgtatgatgtggaagatcacagtgaccttggatggaccgagcagacctggaacttcacctgttccaccactgagaccagtacctgggcagaaggtggaagaaaattcggtgaactggtagaaaaagcgacaggcggtaaaattaaagtcaatgtgtatgctgcagaccagctgaccaacggaaaccagtctgaaggtattcaggctttgatcgacggagatccggtacagatttccatgcacagcaacctgatctattctgcttttgacccgagatttaatgtggtatccttacctttcctgttcgaatctgtggaagatgccgacgcaaagcttgacggagaggcaggagaaaaactgaaagcaatcctggatgaatatggactgcattgtatggggattgcagaaaacggcttccgccagctgaccaacagcagacaggaagtcagatccgtagaagatatgaaaaacctgaagatccgtgtggcaggaagtaacctgt

SEQ ID NO: 653 - DNA, 140 bp, Oliverpabstia intestinalis
  source 1..140: mol_type = genomic DNA
gcgagggacgtgggcagggcaactttgaactagccactaactgcgactatattcccttgggtcagctgacccaagggaaagtctccgtaagtgtcggatttcaaagctttccctaaccgcccacaaagtgtcccttcgct

SEQ ID NO: 654 - DNA, 130 bp, Oliverpabstia intestinalis
  source 1..130: mol_type = genomic DNA
tgatggagtgctataagagatggggagcagatgcgaccaacatgaactggtccgaaacttatacggccctgcagcagaaaaccgtagaaggacaggagaatccgctgccggctatcgatgcagccagtgt

SEQ ID NO: 655 - DNA, 1195344 bp, Agathobacter rectalis
  source 1..1195344: mol_type = genomic DNA
atcatcgtattacttgttgttttttttgatgacattttattcagtatacaatataaaaattaaaaataattatacgtggagaatacgttttttgtttttggcgttaatatgtctgctatttaccgttggagcaaaatgttctactggagcaattgctacaatattaattattattagcttatttgttccggataaaataaaaagagtactcaaatctccgtggatagtaatgggttctatggtagcatcggcattatttcctacattcatgacagttattatgaacaatagtatagtaagatatattgttgttcaagtgttccatgaatctgttgatttaaattttagaaatgtcatttataataatcatatatttcagttgattagtaaaagtttttggtatggatatggttataataatacaatgatgcttgataaaacaaatcaagtatttagtaatgcccaaaatgctttattagagattatacttagatttgggtctattggagcaataatacttgtcattactgtattatattgcttttgcaaaggtgctaagtctgattgtatagaaggctatgtatggttaacttatatatatattattattgggacggttgaagtatcatatagttggtgttttatactgtcgatattcttggttagatggggcagtaagacaagaaataacagtgttatagaatatgattaatgagggaatctttttcgtacgcgatattcttaaggaaggagaatagtgcactatcgttaggaactaactggattatgtgcaataataaagaatgaaagttggaattatgagcatgcatagaataccaaattatggatcttttatgcaagcatattcattaaagaagatgattgaaagtttagatcatgaagtatgttttgttgattatcaggtagaaccaagtatcacaaaaagaaaacgaccagatgaatggataaaatgttttataaaaaataaaaaaagggaatggtttaatagaggaattatagatcaaattcttcataaggaagaaaaagaaaaagatataatgagatcatgtaatggtttgcttgaaatagatgaaaactatgcattccattgcaaagtggatgtgttagttataggcagtgatgaggtgttcaattgtacgcaggcgggtgagaacgttggatattcaccagaattatttggaaaaaatgcccgagcaaaaaaaataataacatatgcggcttcatttggtgataccacttacgacaagctccaaagatatggggtgactgatgatttgatgaaatgggtatctagaattaataatatttctgtacgggataataattcaaaggaaatcataacatctctttgtaaaaaaacacctataattaatttagatcctgtgcttgttggaaacattgaaaaattaaaatggaaaaagccggatttagaatatgaatacattgtcttgtatggatatgagtatagattttcaaaagaagaatgtgataaaatattacattttgcaaaatcagaaaattgtaaagtaattgcactaggagaaagacaatttaaaagtgatatttttattaaatgtagaccggatgaagtattgggatacttttcagaagcaaaatatattataaccgatacatttcatggaagtattttttctattattaatcataaaaaatttgtttcacttattagaaaggctactccacaatcaagtggaaatagacaaaagttgggatttttactcgaacaactttacttacaggaacgtttgataaattcaatagatgagttgtctgagaagatgcataagaacattgactatgtgaatgtagataaaataagagaggaagagcgtaataaaacgatgaaataccttgaaaattgtattggcgaaaggtgagaaatatgcgacgaggaaaatacttagctaaaaatacagcaatatttgcattagggaatattggaactaaagctattagtttttttatggttcctttatacactcaatggttagttcctagtgattacggagtggtagatctgattgctacagtagcattcgttcttatgccagtttttacccttaatattggggaatcagtaatgagatttgatttagatgagggcgcggattatgacaggataatgagtgttggaattgttttcttacttcttagcgtggctttaacttttttagtgtatcctttttcgctatttttttcagagctagccgcttataaaagttatttgtatttatattgtcttacttatggtttttcaacaattttaatatgtaatctcagaggactggagagattgttaagttatgccattgcaaatataattttaacatttggaatagctgtatttaatatgctatttttaggtgtatttagaatgggggttaaaggatatttattatcatatatagtagctcaatttgtagtgatattatttgctttcataactggaagtgtaaaacacactgttgacaattttagtttaaattttgaccttttaaaagagatggtaaaatattcttttctactaattcctacttcattaatgtggtggataatgaattcatccgatagacttatggtaactgcaatgataggtgtttctgcaaatggaatatatgctatttcctataaaataccttcatttttaacaacattatcaacggtatttaatcaggcttggtcatattcagctattaaagaaaatgagagtactgataaagtttgctatacaaataaggtatactttcaattattggataatttaattattataactgcagttttgttgtttcttatgaagccatttatgaaagtttatgtatctaaagagtattatcttgcgtggaaatatactccatacttattaatcgggatgttattttgcactttaggaacatttttatcgactgcatatacagttaacaaagatagcaaaggatttttgtggtcaggaacaatcggtgcaatagtaaatatcgtgttaaacttaattcttataccaattatgcaatgtcatggagcagcacttgcaacatgtatcagttatatttcggtctttatctttagagctattcacacaagaaagtatttaaagttaagattgtttataaaaaatcactatttgtctataggaatcttgattattatggctttctctatgtatataaataatatgatcctttcagagatggtgcttgcaattgaattgttattaataatgatattgaagagagatacattgatgttatatttctatagtttaaaaaatctggtatataaaatgaagagaaaaaaataacatcaatttcaaaaaagcaaatgttttaaattaagatgaattatatagcgaattaacagaggagtgtgagtgatgaacataaagaccgtatgtgaaagaaatatgtgcacaggctgtggagcttgtgtagaaatatgcaagaaaggttcgatatcaatagtagataatttagattcgatgaatgctgttataaatttagatcaatgtgttgactgtggcgtttgttttaaagtttgtccaaataaaaaccacgttgaattgcgaaatcagttatcatggcatcaaggatggacgactaagaaaagtgaaaggaaaaaaagttcgtctggtggatttgcaacagctttatccaaagcattcgttaaaaatggtggtatagtatgtagttgcacattcctagagggagatttcgtttttaaagctgtaagtacagaagaggaagtagaatgctttagaggttcaaagtatgtaaaaagtaatcctaaaggcatttacagaaaggtaaaaaaattactacaagaaaaaaataaagttctatttattggattaccatgtcaaatagcagcagtaaaaaattttgttggagaacaaaacaaggacaatttgtatacagtagacttaatatgtcatgggacaccatcggtcaaaatattggaaaaatacatgagtcagtatggtgtcagtcttagtgaaattaaagatatttcatttagaaccaaaaatgcatttattttaaaaaaagatggtaaaccaattactggacatcatattcaagatagatatacgatgtcattcttatcttccttgaattatacagaaaattgttattattgtaggtatgcaactgacaagcgtgttggtgatattactattggtgatgcttgggggagtgatttgaaagaggagattgataatggaatctctcttattatgtgccagacagaaaaaggcgaagagctattagaattaacaccatttcatcttgataacattaatattgatgaagcattaaaaaacaatcatcaattaaggcatccggcgattatgcctcctaaaagagaacaattttttaaagagataaaaaaaggaagaaattataacgcagttatagcaagaatatatcctaaaatatgtttaaaacaaaaaataaagaatatgatatttgtttttagaaatagcaaaaagatgtcttgacatctattattacatgattcaaccggtttgaaaaatcttattggtgttttattgtccgacggcacactgtgggagttgcaaaccgcactttaaattctgtggaaatacctcccagactgtgcagtcctgtaggtgaccgcaggctgtcgccggtatgcacattggtaccagacaccaatgtggtcaacctacctcgggggatataatgaagtaatttcttgaatcacaggtctaaatttctaagcaattattgtaattgacaagaaggtgctttcattgttataatattaaatttcaccaagatggtgaaaagaggaataaaaatgaaaaataaagcttatgaaaattttttggatataattttgaaagtaccgacggtagaaaaatgcgatttgataaacaaattagataaggaaattaccgttgacattgaacttcaggatggcttttcattcattaccactattcatttattaaaaaatggatatccgaaacagatcagtgaactgtcaactcacttaaacgatgttggatatcatattgtagcggcaccatttatctcaaatggcgcagaagatgtatgtcggagcatgaacattgggtatattgacactgccggaaactgcctgtttcaatatcattcgctttatataaatatttcaggtaataagaataaagaggttccaaaacgtgctcttaaatcaatatttgaacggtcatccatcgtatcatccaaaatattgagagagatgtaccaagatattgataaaagcattgttggggtcaggcaccaatgtggtcaacctaatgtcaacttaagacaagtgccagctcaggttaatgactaacggtgcgaaattgagaaaagaggaaggtagatttgaaaagaagacgcaccttaatagagtttcacagaaaaagccctattaatagctattgatattagaatgcaacttttttattgttaaaatgtgttctgcctattgctttattcttctttcgtcggaatgttcttccaggcataatctgtgaacattgggatcagaccccaatgtagtcatattcgtatatataaatagaaggacaaagaaaaatgattaaatgaaactggagatatacatatgtacaatcctgatgaggactatcaagtcatgcttgccaagttgaagacaatttgtcaaaataaaaatattacacaatatgctttggcaaaggccacagggatgtcaacttccagtataagttgcctaatgaggggagaaacgaaaccatatatttatacagtactgacaatttgtgatgccttgaatgtgacgatagcggatttgctggagaggcaagggtacgatgagaactgtgaagaagatgaggacgtgagagagatgattgaagcataccaatgtttatcgccggagaagaagcggatgctaaaagtttatatggacatgctattgcaatatggcggggaattataaagaactatgtcgatatttagctatactacctctgcataacgaaagagaaaagacgcatttcctgtgttagaatgtagacagaaaagtttataaaccgtgtcccgataataaaggcagcctgctatgaggcggcactgggaaaggtgtttcagataggtttagtaggtttggacggataagtttgtctgagcagacaagttcgggatggacattattgtagattttgctctgtcaaacttaattccgtaagagggtatagtgcggggataagggtgatggggcttttttgattaggatttattattcttaaattcagaattttgtgtgtacagcatgataaggcataggaggattatcttatggcacaaaagtttatgcattataatattgttgtatcatgcccttcagatatggtgggtgatagagaaaaacttcaaaatgctgtggcaattgtgaatgagcagaatgcgcattttcgacaaatgcactttgatattaaatattggcaaaaggatgtcctttttggagtgggtgatccacagcttattatcaacaatagcattatcaaaaatgctgacatggttattgctctttttggaagtagattgggaactcctactgccagggcgacttctggtacgatagaagaaatagaagaaatgataaaggcagggaagcaggtatttgtttgtttttcggaaaaagatataacgataacggcttctgattctgaagaaaagttaagggacatcttaaaagtaagggaatttcaaaagaattataagggactttacatcacttatagaaccgatgagaaacttgaagaaaagataacaaatcaacttagattatttgtcggaagcattgaggaagatagagaaatatatatttgtgacgtaccattcacttatcaggaggttcgtgggaatcgaccaggcttggagaatgcgaaagaacttatctttattgcacgaactggaaaaatatttcttggaaaacactataaccacattaatcagatgattaaaaacggtggcaagattacatatgtaacatctgaagattttaacacggttagggataccaccgaatataaagataatcaggacactgctcttaccattttgaagagattaaaggacatatatcctgatagagtaaacattggatttcttccaacaccagttaatatatcgatgtactatctgaaattgcatgatggaacagagtatattaatgttaagtttaacttccagacgtatcacgggaatgataaacatcctatgtttgatttgtttcctaacaatcctatgtttcctattttccaacatgagattgttggattgcaaaaattgattattccgatagaatgaggaggattatatgagtggatttcatgaatgtgaattgaaggtaaagattgataatgagttgagaactgaacttcgggaaatggtggttaaaaaaggatatgttttaactgatagtcgaattgaaactgattatattatggatactccagagacggctttcggtaaaaatttatttcgagtgcgcgatatgaataatgctgaaggaaagacaattctttatacaattaagcttaaagggacttctactgatttccaagattacacagagtatgagattactccgaaagaagatggcgctgacattttggcgcgattaattaaaagtgtgtgtggggtagaacttgatgagagcatattcaaaattacagatgtgaataaagctttgaacaagttgctctgtgaaggtttcatcattaaacgagcctaccaaaagaagcgtgaggcgtattccgataaagatacaaaggtgttgtttgatatttttcctgatccggttggaatgtttgttgaaatagaagcaggtggcgaagaaaacttaaaatctacagtggagaaacttggattaatgaattgtcctttggaatcaagaaattatgggcaaattattagagagactacagcaggtaataatcgcttgatgttcaagtaaatatttcgatatggatatagtgggaaaatttttggaaggttatgaggattcgatatgaggataattattgacggtactgtcgggtgcggaaagacttctgttattttgggtgaatcgcagagagactctgaacataagaggtttttagggttggcagatcttgggtatcccgttttcactgatctcgttataaatgtgattaagcatatgaggaatagtggtattaacgatccaagtcagaattgggacatttttttcaagatagctgtgcagcattgtataaataactacaataatgcaaatgtgggaacaatcaatttttatgatagaggcatctactatcttgaaattatggcgaaacgctacgggtgtacgatgccatcggaatatgatgatttctgctctaggtttcactatgataatcctgttttcatatttgagccaatcaaaagtcttgatatgacacatccacatagtactgacaataagcagaaagtatatacatgggaagatcgagttaggcagcaccatgagatcgtgaaactatacgagaaaaaagggtatgagacggttattgttccattaaaaagcgatgatccataccgaagtaatgattatagagtacgattcattaaagagcgacttggaatttgattttgtgaggttatatgcattttattcttagagtacgttattagaacgtaagcgatgaataaccacacgggtatccgaaccagggaaccctaaattggcaggttcccacgattctctggaagttccaggctatcatctatgattccggaacacttatcctgtacaaatatactccacggtagcagctgttctatgcctgagggctcatttttgtagtccggcatatacagaagcagggtgtaaagatacttgtaagcattcaggttgtttgcttttgctgtctcgacaagactcataacgattgcagttgctttcgcaccgtcaacagagtcatgaaacaggaagtttttacgcccggtggcgtaaacctttgcttttcgctcagcggaattgtttgagatttcacatcttccatccagaagataattcattaacgattccttatgattcaaggcatacttaaccgctttctccagtttgcttcctccggatggatccagcgtgtcaatccaggaccagaattcatcccagattggtgtttcttcttcaagacgttttgcttttctttcttccggagataactccttatacaaacgttccttgaagaacagacgattgcagaaggcgactcctttttcagcaggaagcagattttcatcttcctctgtagaaatgggttcatccagtacctgctccgagttgatatccagaagccggattcttttttgccttccttttggaacggcatcaaaaaatttacggcgtgcatgagccagacagcagataagaattacatcttcaatgcatccgtatgctgcataaccatcgcactgtatcattccatgaaagcctttcaggaattcaatcggatagacgcttgcccggcctggctgatattcatacagtgccaccggaggcttcccatcgcttccactttgataaatccacatgtaggatttctgagttgcctttcggccatcctcatgcaatacctgacatggaacttcgtctgcgtgaataaggtctcttcttaagagttcctcatgcagccggctgtaaatcggctccagatattcaagagctcctttgataaaccagcgagcctgcgtttcacggggaatgggaacaccactcatgccaaaatccatctcctgccggtaaaacggaagataaagtcccgctttccggtacataatcattgctacaagggatggtgatgccggactgtgtggaaacagagacgctggagcaggtgctgcaacaatcgttgtttcatcttcttcatgacagccgggacagcgcatcttctgctgaaggtaacggacccggaacagttttgcagggattactcttaattcctccctgacaaatgtgtatcccataggttctaacggggtaccacagtccggacaaaacttctgatcatccggcagtggacatttgacttcacagattggaagcgaagcataaagttcttctcgggaagcctttggcttgcgaggttttgaactctttttggttttggccggcggctcctttgcatcatcctctgatatatcttcagctatatcagactccttgtctgctggcaaagagatatttttggaatgctcgcttgaaataccaaagaatctccggtttaactcggcaatggtttcttccagatttgcaatggtctggcgcagatcccggatggtattctgcatgtcctcgccgttttttgtgaggagcgcaatcgtattattctgttgttcaatgattgtcagaaaagtgttgatatcactttgccggttgctgctgtttgacatgatttaccacctgtttatttctactgttattataaaaataaatcaggtttttcgcaaaccggctgattttatgcatggtcattttgaccaataaaatcctgtggatatctaacctgagagcctgtaattcaatggataattccggattttcaggttagatatccaccgtggaataagaaaacgggaggaatccgtccggtattccacaggtggagcaaaaatagaaaaaatgctgttgataagcctggtatgagtcgctttatgaccggaaaaaagtttttatttttctctgttttgtacaaacatcagaagtcttttttccggcttccagctttgattgccttgggctgatcgattgccagcccctccatgagccatcggaattcctgtcttgtaagctggcgtgcttccgaggcattgcgtggccactggaaacgaccgctgccatctaatcttttttgcatcaggacaaaaccatccttgtcgaagtgtaaagccttgattttccggcagtctcttccgcaaaagagaaacagggcattggagtatgggtcaaggtcgtagctgtcccgcacgatagccatgagtccatcaaaactctttctcatatcagtgcggccggtgattacaaaaatcttggaaacaccggacagatcgcctaacataacttttgcagagccgttagcgtttgaacaattgtagactctgccgcagcattggtgatttcaatctgaatcccatgcattgagattttaatcgcagttgcagtaatctcctctgaactacaattcattggtaattcagatacaggattgaaattcagttccacaacttcctgcttctgacagggaatcacggcaccgaccgtagctggtggaatactgcatgctttattgcgaagtcgtttgacatggtaataaaaagtactgataccgatttggtgctccatgcaccagtccttatcagagagcccgcttgaccggcattcgctaatcaggtccagccacttttcatcagagtagtgcagtctttttgaactcatagtaattcactcctaaaggttattcagagtgaattcaaccggaatcaatcacagttagagcaaacggctccaactacaaatgcagctgatccagagagatactcactcctgaagtgattatctcatgaaaagttggtggcgacaaaccgtgcgattatacatcgcttacattagaactatacaaatttctttgtggtgagtagcaagtaatgttaacgtttatgtaattagtcacacaatttgtaggctaattattataacagaaaatacggctgttattttattgtacacattcggttcgcacgccgtgttatacaataattttgtcacaaattgataataggaactaaattggaggaatgtctttgtgataggtatagtggctcagttgtcaagacaaaaatctaagatttttataatgaactgatattgtggataagttacaaaggaacatggggaggatagtgtaactctcccctgaaccatttatgctaagctacatatggcagcagcattgctggatagtagcattcagccggtgtctgatagtcaagtgcggagtgtctccgctcaaagttgtaggtgtggatatactgtccaatggcggttctggcttccctgatgttgttgtactgtgtcagataagcttcctcatatttgaagctgcggaaccagcgctcaatcatgatgttgtccgcccagcggctttttccatccatgctttgacggattccattatcctttacaaagtcaatgtactgctggcttgtaaactggcatccctgatcagaattcagaatctgtggttttgccactctgaaagcttttttaagagcgttgataaccattctggtatcaagtgtgtcatctacttccaaaccaacgatacagcggctgtaccagtcaatcacagcggtcaggtacagaaatccacgcttgattggaatatatgtaatgtcaattgaccatgcctgattcggcttgtcaatgacagcattacgaagaagataaggacacaccttcgcctgttgcatccgcttggaaaggttcatctttggataaatcggataaatatccatttcattcatgtaacgtctggttttgcgtcgaccgacatgataaccatgtgccttcagctgtgcggacatctgtcttgcaccccatgcagggttataggtatgaagatgatcaataatctctttgcaggcaagttcggcttctgatacaggcatccccttgtagtaaatgcttgtacggttgatatcaagcagctttgctccgacagaaatgggtaattccttagtcgtcaaaaggttttggactaaatttactctcgtagtcagatccgcaaatttcttcagatttttttttgagccagtcgacctgcatggttaactgaccaacctttttggcatactccgatttttccttgcgctcttcggcaagcttttctttaaggttttcctcacgcttgtcatcaaacacaacggatgcattatcgaggaactctttcttccaatttcggagcagatttggctgaatattattttcaactgccagggtattgagatccttctcaccctttaacagttcgatcacaaggtctgatttgaattttgcactaaaatttcttctttgtctagacatgataatgaatcctctctttcatactggttttagtatatcagattcattaaaatctgtcctgaaaagtgtcttaatttatgagaccattatacaggaaatataattgttggtaacaacaagaaagtgtaaaaatgcaaagctgattcatatgaaaatgccgcaaaaaccacaatatatagaggcatgtgatggattgcactggatatatagaaaattagatttgataaaaagttatttttatgatatgatatgaattgccttacaagtagttgtaagggttggagattgttgtcaacagttcttccaccagctcagctgagcgggtctgaagctgtctgttagtacatatgaccagattggtcaggactaataataagatgatagttaagaacataatgttgtcctcctgcttgattgtaacacaattaagtattgcatccacaggatagctggcaatcaaatataggtcgtgacctatcatacagattactaagaatgaacgtatacccattgactaaggaacgctatcctccgtgtcaatgggtattgcaaatttaggggtgaagatgatggatattaaagcatggatttcaaatccaaaagtaattgcaaatagcaaaaaagggtatgctcattttgacttaagaactgacattacaaaggtttctgaatatatttcaaatccagaaaaagtagcaaggcacagtttttatccgtttatacattatgttatgagaatggacaaatataataaaaagacgggtgtcaagcctaaaacgcgagaaatctgttatgcagctcatatggatcgttgtatttatcaatattacagtgcaatactaaatgagaattataataagtacttgatagagcaaaatatagaatcggttcccgttgcatacagaacaaatctgaaaaagagcaatattcatattgcgcatgaagcatttcaatttattcgagaaaataagaattgtcttgttttgataggtgactttacaggtttttttgattctcttgaccatcagtatttgaaacaacaatggtgtaaggttatgggatttgattttttgccacaagatcattatgctgttttcaagaatgtaacaaaatatagtatgtgggaattagatgatttgttatcaataacaggactgagccaaaaggaatttaacaagaggagattggctctttccaaagaagagtatcgtaacaacaggagccatatatcgaggaataataaaaccaaacagataccacaggggtcgcctatcagtgcagtgttggcaaatatttatatgattaatgctgataaagaaattcatgactacgttaaagcgttaggtggaatgtacatgagatacagcgatgattttattgtcattgtaccagctaatagatctgagatagcttgcttcaaaaatgtattaagtattttgaagggaattccgaatctggaacttgagccgagtaaaacacagatttttgcggttgcggaatcaagagtggagaatattgggcgagatttattagaaaaggcagatgtgagtaagaaggtgattaattttcttggctttacatttgatggacaaagtgtgtctgttcggtcaaaaacgataagcaaatattactatcgtatgtacagaaaagcaaaatcaatttctaagaatccaacattgtccggagcggataatttatataaaagctattcgatacacggtgctaaagcaaaaccagggaatttttttacatatattaatcacgcaaaggaagtcttcggtgaagatgaactgatagacagggatttgaaaaaccacattcctaaaatacgtaaagcattaaaaggaaagaaataatgacgaaggtttttctttctcttaaacaaatgtattattttaagccgtaaaaaaacggcaagcccatttttcggacttgctgtttttggttttcttcgtattaatgttagattaactaaaacctttattgcaaaatatcattgatataatgcttaattccagattcgtaagaaaagtcatatttttcattcattgcctgaaaatatgatttgatattttcgtcaggaatcggctcgtgagaaggaataccatcactataaccagctctggcagctttccaaggagattctgaatgagtaattctttcaagtacctttccgctatattcgccaaacgtattgaccactaaatcaataattaagtgttcatcagcagtgaggttgtcttcaataccattaaagattgcgaaacgggcatcctcaatcggattgtatttgaaatcccggaacagatcatatacaacagggtatactggtccatgtacccaagcctgacaggtttcgggaaacatcggtgttctgttgagtgcataagatattccatgaataaaataaagtaatttctgtaacataaggggagtaacttcttcaagctgatcaaatacacaagatataactcgtaacattttatcagaaacagaaaaaaggttttcaagttgtgtggctgcttccatagatttggtataagcagcagatgctattttccctttattttctagcagtttctgtttcatatacgatggggaagagatggctgctctaataatgtcagagtattctttggaaggaatttgtccggaaaggtatctcgtaatggtaacctctccaaatcccagtgtcaatgacaacggagcctttccaattttatatattttcattaatttctcaatttcatcaatggatactaaattctcataagctcggtattgttcatctatttcctgaatatttttgtcaatcaggccaggtacagccattgcttcgccacattcatcgcataacgcagcggtaatgctgaagttgtattctttatcttttatgattttattaatgttgattttttctaatgtgtatgtggtgtctttcctgcatgtcgtgcaaaaatccatccgttttttttctgccatgatgatttcctcctatcaactttctatttgaaatagtatttaagtggatatttctgctcatgtagagatacgacaattacatagcagttttccaacttgttaaattttatgtaaagtgaaactaacttatcagaatttccaaatctttctacaagcttaacgtctttaccaaaaatatatagtaactcatgttcaaatcctctatgctcgttgtgacgcacttctgagaaatcagttgctgttagaccaagcaatatatctttagccattgattcatctataatgtagtctaagaatagattggcattatcctgtctacgaggattttgttcaatttataatggtctcataaattaagacactttttcggacaatttataatgaatctgatatactaaaatcagtaacaaagaaaggattcataaaaatgtccagacaaagaagaaatttcagtgccaaatttaaatcagaccttgtaatcgaactacttaagggtgagaaagatctcaatacccttgctgttgaaaataatatccagccgaatctgctccgcaactggaaaaaagaattcctcgacaatgcttctgctgtatttgatgacaagcgtgaggataacctcaaagaaaagcttgctgaagaacgtaaggaaaaggcggagtatgccaaaaaggttggtcagttaaccatgcaggttgattggctcaaaaaaaaatctgaagaaatttgtggaccagactacgagagtaagtttagtccaaaaccttttgacgactaaagaaatcccggcttctgtcggcgcaaaactgcttgatatcaatcgtacaagtatttattacaaaggcacgcctacatccgatgaagaactggcttgtaaagagattatcgatcatctccatacagataacccatcctggggtgcaagacaaatgtccgcccaactgaaggctagaggatatcatgtgggacgtcgacaaacacgacgttatatgaatgaaatggatatttatccaatctatcctaagatgaacctttccaagcgtatgcaacaggccaaggtatgtccttatctgctccgtaatgctatcatagataagccaaatcaggcatggtctattgacattacatatattccaatcaagcgaggttttctatatttgacagctgttattgattggcacagtcgttgcatcgttggctgggaagtagatgatacgcttgataccagaatggtcattaatgctttaaaaaaggcattcaaagtagcaaaaccgcagatattgaattctgatcagggttgccagtttacaagtcagcagtacattgattttgtaaaggtaaacggcatccggcaaagcatggatggcaaaagccgctgggcagataacatcatgattgagcgttggttccgcagcttcaaatatgaagaagcttatctgacacaatacaataacatcaaagaagccagaactgccatcggacagtatatccacacttacaactttgagcggcgtcattctgcacttgattataagacaccggctgaatgctactatccggcaatgctgttgccatatgtagcttagcataaatgggactggggaaggttcaactacttcccctatgttctctgtaacttatcaaccatatcagttcattataaaaatctcagatttttgtcttgacaactgagccactataattcgatatctgttatttctgattgactcctttacttctgataggtaaatgtcaatatcatttttcgtaacgtccaagattatgaattcctccccaattaatgattgcttttttaaaattccctatcatcattatactatatgattggattttgtcaatatcctatcattgtatgctcgttaataatcctgcctccgtgttgttgattgtcaagtaaaattgacccacctgtttgttttgattatttcacatcagaagcaccggagctaagctttgcttagctccggtgcttctgatgtgaaataatcactcataatgatactccttctactgctgtcagaagaagtcataaccataacatgattgtatgaaagagtaaatatctactgtgcgagaataaattccatcaccccatgggcggtggaatttggaaattcattttagatgatgtaatccacgctaacttgaaaaagtaaattccagtgcagaagtaaattccacactcatttaaaagttcttgattttctaagagttttataagctcaaaacgcttatttctgttataataggagtaacttcttggaaaaaagctgatttgatggtatgacaaacggaccactggaaggtagtgtgcgagactaaattccaccggtcatgtgaggaaaatgtgaaagtttaatttccagtccgacagcagatttctaagtggttgttaatggttgaagcgaatcagcttaggcgttagattgaccaaatcagggtcaatgcgcttaagctgaaatgcgtttagggtttcttttccgagggtctctaatgcggcgtcataaggcgtgcttccattaagactttcccttggagtggagttgatgtgattcacgattagattcacatcccattgtgtcaaaaaatcaaaactagttcctttgggaagcaccatgcgaagcatggtgtgagcctgctcaagacctcctttttgtccgctacgcatgggatcacaatagtagatgctggtacgctgaatttcatccagtcctgtttcaagagcgacaggatctccgaattctgaacctctgtctgtcaagatatattcaaagacagataagaactcataggtgcccatacgtttttctaaacggtcaaaaataagccggacagcgcctttagtacaacgattcaggagaaaggcaaggaacagcttttccttagtgaagaaaaaggtcagtaacgtcttgttggattctctggatgagtgtaccgtatccatttctacaaaagaggataactgcagctcactaaaatcactgaataaccttttctcgaagacggttctgtttgtaatctgtgttttatggcactttcgtggcttgaagccgggcttacgttttaaatcaatgtttctggctgtaaacagaccttgatccagataggtgtacaaggaacggactgacatatccagttctggatgattggtaatgatttgatatggagattgtccctgctcgattaaaggagaaacaatgccatcctttttgcgcaattcatgttttgtcatgtttataccggctctggaactggaaagcttttcacggtattttctatcagcaaaacgtgcatcgtatctgtatttctgggcgatggtgcaatgatttatcttttttgtgcagccattacagacatagggcgccttatccagtcttttgcactgttccttcacaaaatccttgcaagtttgattacaggtggggcaggaagtgcattttacatcgcagagaatgatttttccgcagacattggttttccggcaatggaagcgatgaatacaaaagttatgggcattatagaaagtacctttgtgataccagtcggatagacggtgagcccttacttctttggaaatggttgttggatccttgcaaagaaagcgggcaatgttcttaaaggtttctcccttgttcagttcattttaggaaaatagggaaaatatcaaattgttagtgaaaaatgtagatggttatagtataatgtttttaacagataatcaagagttatccgttattttagtttttttgatgataaggcatgttccggaaattcttaattcattttgagtaagttttgctcaaaagcgcagaggagggtataattaatggatacaaaacagatactagactactatattaatattggaaaaaataacactaaaaaatacaagattgcgctggttgctaatgtacgtggcaaaacaaaaaattatgtcgattttgacagttcttcggtaattaatgaatacttttcattaacactttacgaagaaattcaacgtactttgcgtaatgctggttacgaagtatgcactttttttgatgaagatgattttataaaagcagtattagaaaataaaatcgggaatttggaacagctaattgttatgaattcttcacaaaagggaacacatattggaagaaaatcattagttccagctttttgtggcttacataatatcaaattcacaggaagtaacgcttatatagtaagtttatgccgaaataaatttcatacaaattgcatctcacaaaacaggaatctatatactcctgatacatatatttataacctaaaatatggttggatttcaggaaaaccaacgctaggtgaaaaagttataataaaattaaataacgaagcttgcagtattggtatgactaaaaaaaatattataaaatatgatgaaaattcagatgaaattatttctactatggcaaaagaatttagacaggatattatattgcaaaaatttatttgtggatttgaagttgaagtacctattattatggggaaaaatgtttgttctttagatcctgttggcatagaattaaataatgaacattttttgggacaagagatattagattatgaaattcgaggtaaccatagctttgaatattttcatttcaagaatcagtatcctgaaataagcgaaaaaattaagaaaaattcggcacagataggaaaacttttaggaatcgaaggcataggaagaatcgattaccgtataacagagaatggtgaagcctttgttacggatatagcgaccaatccgcatattacaagtatatctagtattgcaaccgcattttcgtggttggaatattcttatactgatatgttttatacaatgataggtttatctattgaaaagtatgtataaagcattaaatattttcttttaaaaaaattctaatttttattgcttcttgcccaaaaagttttcttgtttttgtggcaagaagcatttttgttctataaatcactccaatagaataataaagaataatggaacgtttttccaaaaaatttccaggaattgtcttgatagaaagaacattcattaaacaaactatcttctacatctatatgttcttgaaaactattcttatcaatgaactcaatcagcaataagattttttgctctatataaattttgtaatttgcgctttgcaagttttccaaacaatcatttaagatattttttgctttatctgtttgggaaatatatgccaatgcaattgctaaattaattctaatactaatggcatacatcgcttcattatcattattaaaattaatattattgtacaaattatctaatattttgtatgcactttcatacttatgcatacgcatatatagtacagataagttacataatagaaaaacttgatcggcattgtctcttaagttatctccaaatgtattgttatatatttctaaacatttttctgtggaaattttattagaaaataaaagtgccagtagataattgtttacaaatatttccattcgtggatattgtatatctctatggtgcataataaaatgctgaagcaaaatcgcatattcacctgcctctccaaaatctccacattgacacagtacacctatatagttatttaaacatagaaaatactgtacgggataaatttctttacaattcatattagcaaaataatcaacactactgcgcatatattcttttgaaatattacaatcatgtatagcgtttgagcgccttctcaagatgtttatatattttatggcattatcatcgtatcctagttttgaacttaattgtatatataattccttttcaatatgtagtgcttcatttcgctgccccaaatgaatactagatgtcatatatgtcatcataatacgtagccataaatcaaattcgttatttacagatgaaattagtctgtagggctttaaaatttccaaagcttttattcgatccatttgatttaatgttttggttaaaaccaatgataaaagcaaatctttttcagctaataattctactgggagaataggttcaattttttctaatatttttattacatcaaagtatttttgagtataatatttttcaaaagctttttccataacttcaatataagaattatataatggatttatggaagtaaaggatcttgcagaattatgacttatgtttttttctcgtaatctaaaatcctgtaataacgctaatgaagccattatatatgaatttctatcatttccagaatttaattcatactccattcgttgataatactcagaaggatacagttctttcacgcaaactgccattttggaagaatatatggctttatccttttttgccctaaatgcaaaaatcattctaataagatcatgtgtaaaatgggcatttttcttatcggatgtggttaggcatatttcatctgacttatcaattaaatttgataattctatatggctacattctattaatcgttccacttcatattttggaaaacttaatcctataaatgaagcgtattttaaaagctcagatatttgttttccaacatctccaagaccttgaagtcgttcttttattaaagaatctaatattttttctttagaatcaccctcgttataagtaaaatcaccactagaattaattttctttacaatatttttaattacttccaagtgcccagacgaaagtttatatataatctttttaatatgttcatctatatctttcttattatcaaattcgttcaatgcttcaagaaaatcagaatattccatatcagggaaataatatttgtttgctttttctcttttgagaattttattaataaaggactcttgcgtttgggattcatctgtagttataaagagtaagaatattgtatctttaaaaaatgcaaaagaggattttctaaattctaaaataatatttagtaattctattgatttaatatcaagatactggaaattatcaactacaactagactttttcggctttgagccaaaaatcgcatttttaatataatatccatttcagttgaattatccaaaatatagctaagttgttcttgtttcttatctttagcaaacatagcattttcatataaaaaattcaaaaattcccctgctgttggtatttctttgattatattagatgtcaatttcttattatcgattttcttataatatttatcaagtttatcagacaaacattccttaaatgcataatattctctattttcacacaaagaatccccttgtaaataaaaagcaatatttttactttgctctgcttgaaattgtgcaataatctcttgtgccaaataggattttccacaacctgatttcccatatataatatgaatttcggaatcattccattcagcattcaattcatctataatatttttttgtattgtcaacatatttgattaaatccctttgatatatataagttatggaatttccggaacatgccttatcatcaaaaaaactaaaataacggataactcttgattatccatgaaaggttaaaagtaaaaaagcaatccatcgactacagtactgatggattgccaagtaaaattatatctgaaaattttttctaggatgttttgttgtaagtatatctctctgctttgacatggcaacatgggtataaatctctgtaatattaatagaactatgtccaagcatttcctgaatatagcgaatatcaacatctgcctccaaaagacttgttgcaaatgtgtggcggaacatatgcggagtgatatgtaattcaatcgcagcaagagaggagtatttgttgatcattctgcggacggtttggtctgataatgcccgacctgcctgatttacaaaaaaatgtttacagctatggatttcagatagaaattctttttcatatttgttcaatatactgataacatcatcatttccaatctgtattcttcgttctttagagccttttccatatatcaggatagttctgtcatacaaatttacatcattcattcccagagagcatagttcggaaattcttattccggttgaaaacaggagctctgcaattgcagcatctcttaaagcatttcgtctctgataatttgtttttccatcgttgcattgcttatatatggtttttagaaaaacttccaatgtatggagcggaattatttttgggagaatgacaggttcacggaattttatctgcattttataaaacggatttttctcaatgactttcctatattccagatagtgaaaaagagcttttacggatgcaatttttcttttgacagtttttggtttgtaattttgatgcagatagacaatataatcttctaatattgcttgggaaatattggggatatctgttggtggtatctgttcagtaaattgccttaaatcaatccggtaggctttgagggttttttcatctagtcttttttggtattggcaatactcaagatacttacttatctgttcatttaagttgttcataatggactctcctttgttttttatttgttcaaaactatattatacagaggttgtatcggcggtcatactgtacaaggctgatttatttgcagacttgtgatatactggaagcggtagctccctacgctgctcgtaataatcacacacctctccgcagtgagcagcaggcaacgatcttatggtcggcgaagatgtgagaaaagatagtcgaaaatgaatcatattacccaaaagaatagggggtgtatattatgggaatcttgtcactgtttcaaagaaaacagaaaaatacacaagcaattacaaaaaataatgtttctctgggtaggacagcagatagcattcttaattaacgaggaaaacaaatagtggatggacttaacaaaaccacagctagtaccggtacgccgatggataaattgcatggtggggcaaaaagaatggctcagatgtcaaacataggtggcggttcaaaagcaactggtggaggtggcgttgatgaaggaatgaaagcaatgctacaatacacatgggccaacactgtgaaaataagaaggctgaagccgagaatgtggttaagaagctgttggccggcggtatgagcgcggacgagattctggaaaaactgaaataaacaccaagaaaaaaagaaatgccgtgtggacaaactgaactgatctatgatagtggctgtatttgttaatttagaaaaagtaagaaattgtaaaatagcaattatgttatttggaaaaatgtgagattatagtaaaggatgcgtctgttagatcgatgaaagcaatttgcaataaataaggtgtctgacaccggcaatttttcatctctaaattctttataaacagtaacgcatggacaatcagtcatggcagagtgcttgcggcaaagaaggtcattaaccatagctcctgaagaggcaaagaaggtatcacgagagaccagtgcatcgctttccagaatgaatggaacaatcgacaatataccgtggaaagaagatgatttgtaacaccttgataatttagcatatctgtggtagcataggtaaagaattctgataagcagaaaatttattggggtcaggtaccaatgtggtcaacctaatgtcaacttaatacctgctcatacatactggcaagcgaggtataatcccgcaaacccttgattttaaaggaattatagcaattagccatcttttattcaagttagaaaattttcaaaaatacaaaaaaagtgaaatattagtgtgatttacatagccattctgtttcccagagtggctaattttttgaaaggagtaagaatagcaccgtaatttttttacggaaactattgtgtgaagtgataataatggttatactatacttataaagttttatatgatgaatctgaaagcctgctaataaaaagtcaatagtaaaatgaattatttttatgattgtgattttgggcacaagttttgaaccgccatatttgccggtttgaagaaaaatgagtttagacttggttattgctctaaattacggatgcattccttgaccttgccgtaatagatacgcaggaacttattagccccagcagtcatgtaaacatagtaaggctttccttctgcacgcttcttgacaagaaattgatataccttatcatcttcaggagctgtttgaagcagtgtagacatgatttgaaacaaagtctttcttagacggttggaaccgcatttagatgctttattactctttgaattgtgggtgcctgactgatccacacctgggtctactccggcaaaagcagtcaatgcttcacgatgtgagaaattggaaatatcacctatttctgctataagctggggaccaaaagtttttcccacgccatacatgcccattaccgttgtgtattcgggcagagtagaagcaagttcattcatctttgaacgtagttcttctacatgggaagaagcaagattaagctgctgaatgctttgctgaataagcagtttataagacgcttcttttggaaagacagcaataaggtctttggatgcaagaaatagttccgctggttttgctggttggaaattatagtgatgctttttacagaatgcttgatagcgttccgtgaatgtttttaatccaattttgcggacacaatccacatgccagaatgagtaagcataatccacccatttttcactgccatcatcgcggacagggctgtcaaagagtttattgacaccaggataggtattatccaatagtgcaatcaggttagccttagcggcaaccttttgcttcatgaagaagctgaattgtgagtttaaagtttttaattgagtacgtgtattatccatacttgaatactgtcgcagttctatccagttgtcaagagtatagcgtgcaatcttcttcgcatcagcagggtcggatttgactttgcggatggagttgttgccaaagttcttgatcagatgtggattgacagcactgacaaacaaaccggcttcagaaagagtttttaccactggttcatggtaacgcccggtgcattccaaaacaacacgggtttcaccttccagactgccaatgtatttggcaagctcatccagttcacttgatgtgtgattaacattaaaaggcttacgaataataacacctgctggttgcaggacggcgacggtgctcttgccttttgatacatcaatacctactgcgttgtacattctcgtacctccgaaagtgaatttgtatggtgtccagctatttctcattgcttattcaatctcctggggtatcaaacggacgtgcacagggcagtccaacctgcataaatcgaacggctgcaaatgataggctggctgactggctttcatacggacgtctattgagtccaaggagaatactgtcagaccgatacctcatcattgtacagctttagcaataagagggatagaacccaactggctgttggggtatctaaaccctacacttatatattaggaggaagataggcagtatgctgaaaaagttttcacttaggaattataaaaattttaaagaagatataagtatagatttcgatgaaattgcaggatatcaattcagttcagattgtattacagatggtgttatcagcaagatgttgatatacgggagaaatgccactgggaaaactaatttaggaaaagcgattatgaatatttgtgctaccatgtatcatatgtcaggatataataatgacagcaatttcctaaatgcggattcgacagaagatgctgcattattttcttatacattccaatttgatgaaaatgaattgatatacagatattctcgctattctaatcaagagttaaaagacgaagaattgattattaatggtttatctatttttaaatgtgattttacaaatggagcgtatgaatttgggaatctgagtcagattgaagctgaaactgcaaatacagaaagatatatacaatcactcaataatgaagatggagatgtcgaagcgaaacttccattcctcaggtggttaatgagtaatgtggcaatttcaaatgaatctgttttaattcaattgggaaattatgttcaaagaatgttgatgattacggcaggcaattccacgatgtcttataataagagaggaaatgaaagtttttatgaatccttggaaaataaggaacgtttgcaggatttagaagatttcttaaatgcgatggggattgaatgtaagcttgatctgcaaaaattaccggatggcacaagagaattgtattttgcacacaacaaattgatttcattttttgagaatgcgtctagtggtacattagctttagttaatttgtatcgaagattgatagcaagagcatgggatgcttcttttatttatttagatgagtttgatgcattttatcattatgagatggcagatcaggtgattcgattctttaagagacgttatccgaaatgccagatgattatgacttcgcataacacaaatttgatgacaaacagattgatgagaccagattgtttattcattttatcaagagagggaaatttaacagccctttgtaatgcaacacaaagagagttaagagaaggacacaatcttgaaaagatgtatatcagtggggagtttgaaaaatatgaataaatacacaggcgaagtgaggaaacgaagccaaaatctactgatagtagaaggaaatcatgaaaaaaacgaactgttttggttactgtttaaatgttttccagaaataaatatcgatatggatgacatatggatttatgggacgaatatttatatgttgtatgatgatattgcagcagaatatggggctgattgggcaagtgcaggagaagatatcgacttaccatatgttataagtaagaagaagtatccagaaaatttgcgctataaagaagattttacaaatattcttataatctttgattttgaacgacatgatacaaatttttcaaaagtaaaaatcgaagaaatgcaaagaattttcatggatgcaacggatattggaaaattatatattaactatccgatgattgagtcatatcaacatctgaaatgtttcccagacgacgactatgccgaaagaaaaattccagtcacactgcaaccaggaaaggaatacaaggcattggttaaaaaagaaactgttatcggaaagatggtggagtttccacatagagtggaagatttgttagatgggcgtttcggtatcagagatgaacaagcaagaacggaatgtagtgacaaaatcttaaagattacaacagatgagaatatggacgaagctattcagaatattctacatgatgtagtagaagagcaggcattggaaaccgcaaaatatcaattgaaagattgggtgaaaaaagctggatatgcacaaatgggagaaaactattgggagcatatgaggaagatatttattcagattatccgccataatatctgtaaagctaatcgtatccaaaatggaacatatcagattgaagaagagaaatacaagcagagttttgaaaagttagatttgatgaagattttagaaaatcagacttcagcgagtcgtgatgaacagaatggatttatatgggtattgagtacttgtgtattcgtagttccagaatataatttttcacttgtaacagaataaatattgaataatttgatagaaaaaccgattgataaaaaattcaatcggtttttttggttgtgcgccatgggcgcgctctaacgggtgcaagtcccgaacacgccgtaaacgctccataggtggtactcttgtagacctgcctattttcctagataattagcttacgaaggtaatcggtattttcgccgaattcgtcgaattcgccgattacgtcgaataaatcgtaaggagtcaaaattaaatgggtaaatctacttcagtaaaacgtgaaatccgcttccaacagtggattcaacaggttaaagagtacaatgaaaggccagatggcatgagcatgtccgcctggtgtaaatcacggggaattgcgcagtctacatttgcaacacgcttacaaaaggttcaggccagatgcctggaatcatgtcagatatcagctgaatcctctgaactctcagtatcatcagagcccgctatgccagcttttgttgaattaccagttaccaaatactcatgtgaagacaagccagcagctgtgatatcatgtcccaactttaagattgaaatatctgaatcagtatcagaagcttttctactaaagttaataggagtgatgaagcatgcttaataatgcaactggattcaaaaaaatatatatagcctgcggacaaacggatcttaggcgtggaattgagggcctggcaaacattatccgttttcagttccagctggatccatatgataaggacaccctgtttctattttgcggcaaaaagaataccagaatcaaaggccttctatgggaaggtgacggctttctgcttctctacaagagacttgatgtcggagcattcagctggcctcgtaatacagcagaggcccttgagattacctcagaacaatacaaacttctcatggaaggcttctccattgttgcaaagcgccctatcacagagcttactaacccgcctagagccatttagttttgtgcaatacgtagaaaataaaatccttcattatggagcatatttaattgttaccggcacttatccacgaacagaatacagatagtgtaataagtcatctgaattacacaatcattattaatttcgtggataatacctctgaaaaactggaaatattcagtttctcagaggtgttatccaccgtcaaaatgcctattggttaaatgccttaaattggcataattcaaggcaatacgctataatagaactagtaaaaagagaggttccattatggcaattaagtacacagaagaacaacttaatacagtagacaagtcgcttattatacaaatgtttctcaatcagcaggaagagttgagtaaagccgtaaatcagattgagcagctaacaaaagaggttcaatctggtaacgacaagctgcagcgcatgatggaacagataattctttccaacaatgcccgcttcggacgttcttccgaaaagatggataatactgaccagatttcatttatggaagtagatggaaacatcatattttttaatgaatctgaagcagtatgcgatctatccgccgaggagccagaagacctggagcctaagccacgcggaaagaaaaaggttggcaaaaaggaagctgatatgtcaggtcttcctgtaaatcgtgttaatcactacatgacagaagaagagcttattgctgagttcggtgagaatggctggaagcagcttccagatgcaatctcaaagcgatataaatttatcccggcaaaggtcatagttacagagcatcatgtaggtgtatatgccagcaagaaggataatcgtatagtgaaagctgattatccaaaggctcttcttaaaggaagtcctgtatcagcatctattgctgcagctatcatgaatggtaagtatgtaaatgcgtttcctctttatcgattagaaaaagagtttgaacgctatggtctggcaatcacccgccaaaacatggccaactggatgatccgtcttggtgagacctacatatcagttatgtatgattatctgcataagctaatctatgactatcatgtaatccaggccgacgaaactccggttctcgtaaacaaggatggccgagctgcaggtagcaagagctatatgtgggtctaccgttcagggtatatgaatcctgaacaacagataatcctatatgattatcagctcaccagaaatgcctcacatcctagagaattcctaaaggatttcagtggaatctgtgtgaccgatggatatcaggtctatcacactcttgaaaaagagaaagaagacctaaccattgcgggctgctgggttcacatgagacgccgattcgagcaggctctacaagtgattccaaagggatcccaaaaaggaaccgtatcatacattgccatgaagcagattcaggcaatctaccgggaagaaggtaagctaaaggatctgacttccaatgaacgacttgagcaacgacaggcaataatcaaaccgcttgtggatgccttgtttatgtacctaaaacaaaatcaggcaaatgtatcgggctcatgtaagcttcaggatgcatttaaatagtaagcgctcaatattccaacgctagattttaattaacgcttgcatcatctttgctagatgcaagcgttttactacattttaatttttgcaaacattttgaacttcttcgctccacggagtcaaagtctcaagctgttcatctgacatggcttcacttggacgatgctccaaaagatatttcaggtatttataaatgttaagctcattggcttttgccatctcaaccattgtgtagaccagtgcactggcagtggcaccttttggagttgcgctgaacagccagtttttcctgccaactgtaaatggacgtatggcattttcacttaaattattggaaaaactacagtggccatcctcaagatatgtcatcaacgtgtctttccggttttgggcatacttcaccgctgtctcgaaacggcttcccttacgtggcttctgctcgtcaagccagttccaaaacgcatcgagtatcggtttttctttttcaagacgataggcttttctctgctcaaatgtgtgcttcttgttttgtgatctgcgctcatactcaaaaagctttgaacagaactggactccctgtactgccggattgctgtaatcatactgctttccttttggaaccgcatcaatgaagtatcttcttgcatgcgcccagcaggagcagcgcctgatgccagggagattattatagccctgataaccatccgtttccaggtatccgtccgaaaaaccatcaaggaaatcaactgcattgtatcttgcccttgtttccgtgtagtggtaaaggacgatagggggcagtccatcttcaccagagcggaacagccacatgaaagaatctgtttcgggatttctttccggctccttcagtacctgtatccgtgtctcatctgccatgaggtatttcctttgaaggagctgtctgtgaagataatcatacatcggtttgaaataattatccgcacaatatataatccagttggcaagtgttgccctggtaaaatctactccaagctgatgccagtcctgttcctgacggtacagtggcattgcatttgcgaacttctgatacattacccaggcaacagctgatcctgaagcatagctgtttggaataagtgcctccgggacagcagcctttacaaactttatattttcttccattgcatctgctgtagagcattcaggacatttgtatgtctcacggtaaatgtttaccacttcaccttttgcatgggtaaaacggaattcatgccgtacaaactctttgcctataggttcaagggcagcaccacactcatcacagactcgctcattttcaggaagtgaaataatctcatcacgagatggaacgcctttaaaaagttcctcaagagtacgttttttcttacgtgtatgctcgggaaccttaatagcaggtgccttaagatcaacatcagcttcctgctcagcttcatcaaacagattcagctgaccttccacatctttcatcttttcgcttgatgtgccgaacagtttctttgtaaggtaatcaatctgtgccagaagattctgtatctgctcacggtcagcttcgtgatccttctttaatgactggatcagttccgtctgggctgcaatggttgtattcagttggctgataagatccttctgctcaagaagttttgagtcttttgcacttactgccatgtgattttctgctcctttttcgatactcttattataccacaaagagcattaaaaaagaagcagaaatgccagtgttttcaaggcttcacggcgttttaaatgctttgggctgttcgatttcaagacctgacataagccagtcgaattgctgccatgtaagctgacgcacttcctgacttgaacgtggccagcggaacctgccttttacttccatgcgtttatacaggagtacaaagccatcattttcccatagaagtgcctttaccctgtcacagcgttttccacagaacaggtaaagagcactgcgtcttggatccatgtgaagctggtcttcaacgattgcacacagtccgtcgatcgactttctcatatcggtgtacccagtcacaatataaagctcgccggcagctgtgatatcgcctagcatgaaagctccgtaagtatctggattgttttggcaagaagcagtggatccgtttcgtttgaaatacgcagattcatgtttccaatcattaactccattgcagctgtatcagtatttttattcatgtcagtgggaaccgaaatggaattcatctcaatttttacgacttcctgatgagactgttcataagttgacagctgatttttctcaggaatatctccgcagccattcttgcggagacgcttaacccagttgtaaaatgtgcctggattaatgtcattgtttaaacaccactgataatcagacagtccgcttttgcgacattccataatcaggcggtattgttcttcgactggtactcttggtgctctcatagtttgtcccctcataataattagagtaaaatgctagcatctagcaaacataagtatagtaaaacactagcatttcctgatacttattatgagttgataattaacgtgttgcaatccgtcgaattattttgcgcttactctgatggagctggtgcttggtcatatttattccagaacgagaagatatcagcagttcacgatattttctgtcagcagcacggccgttgtaatagtatttatgtgcaatcgtgcagtgatttatctttttcgtgcagccattgcaaacatatggcgctttgtccaatcgtttacatcgttctttttcaaagtccttgcaggtctgattacatgtaggacatgaggtacatttaatgtcacagagaaggatttttccacaggcattggtcttttgacaatggtaacgatgaatgcaaaagttctttgcgttataaaaagtacctttgtgataccaatctgaaagccgatgagcacggacttctttagatatagttgttggatctttacataaaaatgctgcaatgtctttaaatggagtcccttttgccagttcattttcaatatagatccgatcatttaaagtaaggtgtttctggtttcctggtatatatttactcataatgattctccttctactgctgtcagaaggagtcataaccataacatgattgtatgaaagagtaaatatctactgtgcgagagtaaattccatcaccccatgggcggtggaatttagaaattcatttttgggtggataaaagaagataagcgacatctatacagcgaaaatgtaaaatgatatactgaagacaaggtagaattggtgtggaaaatgttataggaggtgccggaatgccgaagaagaaaaaaatacagagaaaaagtatagataaaaccaagacaattccgaagcccaaagcgagtattgaggaattacaggagtcaagaaatggcggtcagattgcattgaggggatattcttaccagttcttgtattcatgctatttgatgctgtcatgtaaagatgagaatacagtctttaatttggaaggtattgaagatattgacaaaattgtgagtacgagtgatgaacagaagacaatgcatattcaattgaaatattctgagaataagcaggatgcttcttttatgaaaagtgtgttgaagaattttttagaagcctatttacttgataaaaatagagcattcaaattagtgtatgatttttcagttgcaaaagggcatctgagtaagctagtgaataatatattggattcagacgaattacaatattggaaagccacagttgatgagataaaaaatgaaaatcctcagtggaattggaatcagcttgattttgatgatttcatttcgaaggtatcgtatgaaaacataagaaaagcagtattggcagaacgtgttgagatggccctgattgaaaattatgatattacaacagacaatatcgaactgtttgccaatagcatcaaaatgttttgttttgagaagatggagacaagaagtgccgtatcattaaatgatttaaaacatcaaattgaactggttaaattcgatataagtaagggagaagaaaatccggctcatggctggatagaaaaagtaaattttgatgaattaactgatcaagaatccagttattatgaaggtaaaaaagcgacaccgatggatattgtgaaggggctgcctgtatcacgagttttacttgaaaaggatatacgaacatcagtaaacaattatatggtgacggttataaagtcgtcaagcggccagggaaaaacaaccttagcattgaaaacacaatatggcctgcaaaaggaatacacaccgtatcagcttattaattgcagtgatagaggaacgctgagacatattgtggaatattttcatgccaggatcagactgggtgaaaaaccattgattttaatagataatctagatgcgcatttgagtgagtggaatcaattggttcagttaatgcaatctgatgtgaaatataattataaaattcttattacttcacgagaaaacgactggtataattatgcaggtgatttaagtaatatacattccatgaatatcataaagccaatgctttctaaagaagaagcggctgctatttttaacaccttgcagcaggcaggatatatacatccaaagataaaggattggaaacatgcctggaaccagatagcggataagaaactgctgatagaatatgtgtatctgttaacacatggtgaaatgattgccgaacgtatttcatcacaaatgtatgaaataggaagaaatgagaccggaagcattaagttcgaattattaagacaggtttgttttgcggatgtatgcggtattagattatcgacaaaaaagctgttgcgaagtttagctccgagaacggtttatgatattggacaaatcttaaaaagtatggcagatgaatttttggttcatataagccgagatggggattatattgaaggattacatccggttcgctcacggcatattgtagaatatttacatgagtattatccattggaggaaacggcttacaacattacaaaactggccgatttacaggacttttctgtacttttttctcattatcctgaatttgcgtttgataaggaaagtttttattcggatgtggttaatgaatggtggaaccttgaagatttaaaatgttttgtgtcagcaatcaggggaactttttcaggctgtgttatgcagtattttagaaataatgaagaattattcaatgaagcgaataatcaaggtggtttatttgtaattgccacagaagtgtgtccatttgctcagtttcgggaaatagatgagtcagtccagactttggaacaaatgagagaaataatgccgaaaaatgagaatatccaatatttgttaaatctgaaagatagtattcctgcaattgatatgacgcaaacagatatatatattttaagtatgcgattgtttaagcggttaaaggacgtgaatacgaaaaatgtgtccgacctggacgcatatgcaatgatagcagattggctgtataatatggatgcttctatgaatttggcttcgaatatcaatctgacagatttgtggacacgtatagagaaatattcgatagatacaatttctttattaatgtatacagcttattgcggagacagggatatatatagcttatttgtatccgaaaatcttgaaatgattttgagctatcttaagcgaactacgttttcacataaattatatgtagatgaaaccgagacggctattcacgttgaatatgtattgagagcaagtgaattgcagaatggaaatcaggaaagtgtttcacgattaaattatatttgcaggacattgccgatttatgagacctattgctcggacgcaattatgccgaaatacgacatgctacagctatatagggtgccggatgatgcacataaagaaatgccgcgaagaaatttggtaattgcttttcataaagaatttacgtctttatggataaaaacaattcagagtaattatgaatttgattcagtttcggaatggattgaatattggtttcaggttcgaaaatgtatgtatgagtgcctggataaaataggggtatacatgtataaagctttggcgggaaagaggaccggcagtaccggaactgaatttgacaaaacaagaaaaaagatggataggatgttgtgcagtacgttatcatatccaaaagaacatcgaccattcgaagaagaagtagaggtgccgaaaaagtttttagaagttaaacaagcttattttaatagcatgcagaattttctgagacaggttgccggtttgattcaaagagatgaaaatgatgttagattggctttgtataatttgaaacaagctaaggcaggactgccaaagatgcataagttttttgatggtatggagttagacgaagagatggcttcgaaacatacaaatctatgcaggcaggagtctcaaaaaatattggaaatttatatgtgttgtcagtactttttgcagcatgacgcttctccgttatttgacaagtatcaaataagaaattggtatagggatgtctgcacaaaagaaattgaagatgtgaatgtcgcattggatgcaatgcagcaggagtatgacgctgtttttcctgatcaagcctatgaagaggcggtatttaaacattatccgataattcttaggtcatttgatatgacaagtgaagaggttatgcaggattttgtgttaagaacgatagcatttgctgagacgtcatttgattacatgttggttttgcaatgtgatgaaaatggagccattcttcaacatgcgattaagtttccaaaacgattttttaaggcgatacaagaagcacttgtttctggtgaggagattacagatacttcactcttgacaccatatccgatagacgtaactgaaaatatgcttgaatgttttagtggagattggaaaatcaaacgtcagacggataatccatatgttcactatctaggggatatagcagaagaattatgggtgtattccaagcttcgtgaactgttgtgtacagaagaagatagagaatattgcatatgtgaattaaagaaagttgcggaaaaaattgcaataatgaaaaaagaaattcatcttcatttggatgaagaagttgcggaccaaatagatgagatgtgtaatcatgtatatgaaggaaattgctttgataacataaggcttaatgaatttgttcaaaatcttcaatatatagtggtataaattttttctagtgtaaatgtcaatataaaaatgttcaaaaaatggaaaataaagaatatttgtgattcctcatcttgtccaaattcagctctcatttttgtccggcaactgctcattcattgccacgattaagattacatttccggggctttcagctccggatttattttacccaaggaaaaagaatattgggtaacggaaatccttatattatagagctcgatgaagaaaaggcagatccgtattatcttgctgcattttttggaagtgagcaaggtacagcggcactaaggagtataacagttggtgcaacgattccaaatatcggagttgagcagttgacgaagcttgttattccaattccgccacttgaaaaacagaaagagattgctgacaaatataagactgtaaaagatgaaattacaatgcttcagttaaagctcgaaaaagcaaagaacagaatggcacatatcattgaggaagggggatttgattaatgataattacaaaaccaaaactatctcttgaggggcaaatcgagcacttgaagaaaaaaggtgtgctttttaacataatgaatgaagagtcagctaaggaatatcttactcagcataataattattttaaactgacggcatatagaaaaaattatgataagcatcctgatggagaaaacaagggaaaatacataaacctagagtttgcatatctggtggatttggctgtgatagatatgagactgcgatatcggattgtgcatatggctctagatattgaacatcatacaaagctacaacttctgcgtatgatggataagtttaatgaggatggatataaaattgttcaggattatctggattatttggggaaaacgcagagaaaaatttgtgatagtgagataagcaggaatagaggaaatatatattgtggtgatattgtagataaatatgatggcgcttatccaatatgggcttttattgaaataattccttttggaagattggtggatttttatgacttttgtgcggagcggtttgcagataaggaaatgaagaataatttttacagacttttgacttgtaaggagattagaaatgcttctgcacatagcaattgtattttgaataaccttaagtctggtacgattgctcacaaaactaatagcgctgttacaaatgagcttatgacgattccgaatatgaatagcaattttagaaaaaatcgaatgagcaatgcacgaattcagcaattagtgacattgttttatatgcacaggactatggttgaaagcgatggtattaaaaagtctgaaagcgaagaaattcagaaggtaatgaaaagaattgataggaattatgactattatagtacaaatcctatgattaaaggtacttttgattttttgaaaatggtggttgacaattggtttaagaccgtgtaaaatgtatatcacatagaaaaagtttatcttttgcagagcggcattgtgaaaacgatgttagctctgtttttttgtttatgcttccttttcttgtattttacatggcattccgctatactagtattaagtatagctgattattttggaggtatttctatgaagcttaaaacaggacaaaagtgcgcatttggatttggcgcattcggaaaagatattgtgtatatgcttatttcatcgtatttgctctactactacaatgtagtgcttgggatgagcagtgtgtttatcggcacggtgatgatggcggccaggatttttgatgcattcaatgacccggtgatgggtattatcgtagcaaagacacgtaccagatggggcaggttcaggccttggatttttgccggcacagtgctcaatgctgtgaccatctatgctttatatgccactcctgagtctatgggtgattcagcgcagagagtgtggcttacagtgttttactttgcatggggcatcacatatacgcttatggatattccgttttggtctatgattcctgcaatcactgagccgggcagcgacagggagcagcttacatcgcttgcaaggacatgctctggtattggagatgctatccctacggtgctcacgatgacagtggtgccgattcttggtgcaggaagctctatggctgactacaggattggatttaagtggtgggcacttattatagcggtggtatttgtgatttctgagcttgtatgcgtggcatgtgtgcctgaaagaccggttgcatgtgatgagaagccgggaaagatatctgatatgtttaaagccttatttaagaacgaccaggctatgactgttgtggtatcaatcattctcgtgtatacatcactcaatatctgtggtaacctagtgctttatttcttccggtttgatgtgggaaacgagggcgcatattctatatttgctgcagttgcttttgcagcacaggtgcttgtcatgatggttataccgctgcttcgcaagagattcagcaaaagccagctttttatatcaggatttattattcagatagcaggctttgcggtgatacttatcatggcatttgcaaagctctacacgccgcagagctggtacatactctgcctgccgggtattttgatttatctgggctatggtatgctcaatgttatcatgactatatttctttcagattctgttgattatggtgaggtgatgaatggcacgagagaggagtcggtcattttctcaatgcagacatttacagtaaagctcgcatccggtgtagcggtatttctggctgggctggtggttgactggattcatctggataccgcggctgcggtacagacacaggatacacttgatgctcttcgcatgtggatgacgattccgtctgttatattgctcattgtgggtatatttgtatttaagagattttataagctggatgatgcaaggatggaagaaattaaatccaagctaaattaaaaactgctgtctgattgataaaagaaggtcgaaaatacagtgaaaaaacgaataattaattatagacttaagattgacaatctgcttgccaatcctgataagatatcaaaagaagagtggaagaaaatactgcaggagcacctgacacaaatagccttcttccagcatgagcgcctcgtgcacctcatagtgacagtaacctttgccatactcaccatgatgtcaataatcgcatccatcatgataagcaacccaatgcttcttgttcttacactgttattcttagtgctgttggtgccgtatatcatgcactactatacactggaaaatgaagtgcagaagatgtatacccaatatgatgagattttgaagcatctgtcctagctagcaagcatataagcgagtgcaacgatcaacatatgcacatataaaagtagaaagttatcaaagacagaacccggcgcagccggggcttttgcccttgaccgcatatacgaagctgcttagagtctgtagaattgcatacgaaaaccaacaacgcccatgcatgaatgcatgggcgaattttttatttcttaagcttcttctgtgccgtagaaagcatcagcttaatacggttcagctggttcacctcagaagcacccggatcataatcgatagccacgatattggcatccggatgatcatgtctgattctctttataactcccttacccacaatatggttcggtaagcaggcaaatggctgtgcacagatgatgtttgtgacgccctcattgatgagctcaagcatctcacctgtcaagaaccagccctcaccggtctgattaccgcacgaaacgataggagaagcatactctgcgagatcctgcacgtgagcggttggctcaaaatgcttgctcttagccagcacttttggaagaagcatatactggcacattggagttaaatgattatgtgaatttgctgtacaatagttgttgggctagaaagtataatattcagcttccaggcattaagtgggaaaaaattagcgatggaattcataagcggattgagaaaatgacgcactaatacagaggttgtagtagcaccggaaaactcttcaattgcaagtttgctttttaattctttgtatttcaattctacaggccagcgataaaagtatagttcttgaaacattgactgggtaattgtcgagtcaaacagatttgttgcaagatattccttagttccattatcaagaatgacttcaataacacgtattttaatatcctttgtgccatttttttcatcgcctggaagaacagtaataatgtcactagaacattttagtacgtcctatattatgatgaaatagtggctttataataatctataacatttacaaatggaatgacgatttttccattgttaaaaattgacgaagaaagagattctattttgcctcgagctatgccaataagtgcagatgctccatttatagcaactaactgtttgaagtcttcctctgatattttaccttttgaaagaaatgctccggtaatggtaaaatgtatattacaattatcattatcagattgatttataattatatcgaagtcaattgtcatttgtgaaaatatttcttttgttttttcaatgttttggaattgaggttcatttatagtcattccaaagctgcgttgggcatcattttctatatcgacaatggtgttgtctacggtaagttttgcaacggaagcacctagtaattcgattcctgtagctattaaattcagttccattatgcaatagcctccttatcttttatgtatttaacccaattattttgcttgttattttgagtggattcgctattccattttagaacagtataattttgcttgccaataatgggggttaaatcaagttgaagatgcagattaagcttttgacaaatttcatttagagtttttattgtgaaattgtattctctgctttcccaacgtgataccataccttgtgatacattcatatatgctgcaaattctttttgtgtcatatttagttctaggcggcgcctttcgatttttgctgatatttttgctaattctataattgattttgcttctgcttctgcgattccatcagtaagccatgttgtttcctgtgcgtttgatattttgtcgtatatgctcatgtttcattcctctgttcttctatagtatcttttatgtatgattatacattattcttgaagctgtttgagtcgatttttggcaactgaaattgcattttgataatcacttttgtttttctctaaaaataccgttaataaaattattatctttctatctataatggtatagataattcgtacattttttcttgagttcggtctatgtatactatataaatctttttcgttggttaatttttcaaatgctgctaaatcgatagctttttctttttctatatctaatactgccagatcagcgagtaattttttttgatattctggatagggttcagaattcttccatggctgatttacagcctttttaaattcttttttaatagctgaaacagcatagacatcacttattcccgaaatactaattttttctaacgccacattttatattcccctttctctaaagataactatattatattacttataagtaatattttcaattgtttattgtaagaaaattacaaaatatgtagatgcagtggtggtgcctggcaccattaaatttttatattctttattgtggcaatgaaatcagcagttgctggacagaaatgagagctgaatttggacaagataaggaatcataaatattgtattttacatggcattccgctatactagtattaagtatagcggattatttttttggaggcttttatggcaaatactttgaagttaccggttggaattgaaaattttgaggaaattcgtaaactggggttctattatattgacaagacaaggcttatagaacagcttttacagggatggggaaaggtgactctttttacacgtccaaggcgttttggaaagacactcaatatgagtatgcttaggagcttttttgaaataggaatggacaaatctttgtttgacggcttatatatttctggcaacaaagtactttgtgatgagcatatgggtaagtatcctgtcatatttctttcattcaagggtgtggatggtttagactttactacggcaagacgtatgctgtgtgctattttaaaggatgagcttgacagacattactatttgaagaccagtgatgtattgactgatgaggatagaatactgtttacaaagatgcttcatgggcaggatgacaatattgaggatagtatacgaatgctttcaaagctgttgtataagcactatggtcagaaagtagttattctcatagatgagtatgatgtgccactcgataaagcttttcagaatggctactacaaggagatggtttctctcatcagggggcttttcgggcaggcgctcaagaccaatgagtttttacagtttgcggtgctcacgggctgccttcgcgtgtcaaaggagagcatttttacagggctcaataactttgaaatcaattctattgtggatattgaccatgatgagcagtttggctttactgatgatgaggtcatgaaacttctttctgattatgacaggagcgagaggtacccggacgtaaaggaatggtatgacggttatcattttggtaatgcggatatttattgtccatgggatgtgataaattttgccaagaagcttgtttcagatccgtcagccagaccgagtgcgttctggattaacagcagtggcaatgatatggtgaagcgctttgtggacaaggctgatcagaccacgagagatgagattgagaagctcgtggcaggtggatttgtggagaagcagcttcggcttgatctgacctatgatgagattgacaatacgattgacaatctgtggagtgtgctctttactacaggctatctcaccaaaatcggagaggtcaaggtgcctgacagtgagagctatgcctataagcttgtgattcctaataaagaggtgcgtgaggtgtttattctccaaattcaggagtggttcaaggctgttgttgcaaaagatgatgatactatgaagcttttatcaagggcaattctggataaagatgagaaacagattgccaggcagctaaacatcgtgatgagccgcatgataagtatactcgatacaaaggcgcctgatgctatgaaggagaatttctatcatggcttacttcttggtctgcttcgaggcagcaatccggactggcttatcaagtcgaatcgtgagtcgggagatggttttagcgatattttaatcatgccggaggatcctgatgcgggcatcgttatagaggtgaagtatgctaaggagatgaaggaacttgacgcagcgtgcgaggctgcgataacgcagattaaggacaagcgctatgatgaggctctgcgggatgaggaccggtgtgatattttagcctatggcattgctttttgcaggaaacggtgcagggtggttggagagaaattttaaattggctgtaatcgttgctggtcacactgttaggtgtgaacagtaactatctgggatgttgcatccggtaatgaaaaatatattgctttcgtagtcaaagtatgttacgatactccatggttacaaattacagtgacagttattatatcatttaaacaaaagaaaggtaggagaatagttatgagcgacaacttcaatatgtatgatcaggcgaatcagcagggcaatccaaatataccgcctatgccgccgatggaggaaaagaagggaatgtcaattgcatctatggtgcttggtattatcggtctggtattctggtgtattccaatccttggcggacctattggtattgtaggacttatcctcggtatcgtaggcaggaaaaagggtggaaggggcatggcaaccgctggtattgttatgtcaattattaccattgtacttgcagttatcaatgctattgctggtgtttatctgcaaacatcaaatgtcttgaaccagttataatcacataacaggtgatatctttaattgcattttattttttaatccgctatgccagaggttggtatagcggatttttagattcaattatcattgtattaaaataaaaaagtacgtattaggaaaggtggaaaataaaatgaaaaaacgaataattaattatagacttaagattgacaatctgcttgccaatcctgataagatatcaaaagaagagtggaagaaaatactgcaggaacacctgacacaaatagccttcttccagcatgagcgccttgtgcacctcatagtgacagtaacctttgccatactcaccatgatgtcaataatcgcatccatcatgataagcaacccaatgcttcttgttcttacactgttattcttagtgctgttggtgccatatatcatgcactactatacactggaaaatgaagtgcagaagatgtataaccaatatgatgagatattgaatcatttagaataagaaacatctgtacataaaaaagtggaaagttaccaaagacagaacccggcgcagccggggctttttgcccttgcccgcatatacgaagctgcttagagtctgtagaattgcatacgaaaaccaacaacgcccatgcatgaatgcatgggcgaattttttacttcttaagcttcttctgtgctgtagaaagcatcagcttaatacggttcagctggttcacctcagaagcacctggatcataatcgatagccacgatattggcatccggatgatcatgtctgattctctttataactcccttacccacaatatggttcggtaagcatgcaaatggctgtgcacagatgatgtttgtgacgccctcattgatgagctcaagcatctcccctgtcaaaaaccagccttcaccggtctgattaccacacgaaacgataggagaagcatactttgcgagatcctgcacgtgagcggttggctcaaaatgcttgctcttagccagctcatctcttgcatcctttctgagccactcgaagaaggcgataagtcggttgttcataaacttagctttcttagaagcaccgagatagtcagccttgaaattcgtgttgtagcagcagtagagtaagaaatcagtcagatcaggcactacagcctcggctccttcagcttcgagcaggtcaaccacatagttgtttgctgcaggcaggaatttgacgagaatctcaccgaccacgccgacacgcggcttaacctcatctgtcataggcagattgtcgaaatcccttatgatttcgcggcacatctttttgtatttcttgtgagagagcatttttgtgttgccgacaaagtcgatgactctctttttccacttctcatggagtgcattggcacttcccggttctttctcataaggacgtaccctgtagagacagcgcataaagatatcgccaaactcaagtgcatacagtccgtgctggatgaggcttggagtaaacttaaagcccgggtttttctcgagacccaccatgttgattgagataacaggcacatcaggatatccggccttttcgagggctcttcggataaatccgatgtagtttgtcgcacggcatccgccacctgtctgtgagatgaggatggctgtgtgtgtcatatcatagttgcctgatttgacggctgccataatctgtcctacgacaatgagtgaagggtagcaggcatcgttgtttacgaacttaagtcccacgtccacacattcccttgcagggatatcaggtatgaccatattgtagccggctgccttaaaggctggcacgagaaggtcaaagtgtataggtgacatctgagggcagatgatggtgtagttgtcctttttcatctgctcggtgaatacaacacgctcgtagttagacggctttaattcacgcttttcatgcttggtttccttgactcttatggcggcaaggagcgagcggatacggattcttgctgcgcccaggttgtttacctcgtcgattttcaggcaggtgtatatcttgcctgagcctgtcaggatatcatttacgcagtcggttgtgacagcatcaagaccgcagccaaacgagttgagctggattaagtcaaggtcatcacgggtctttacaaagttggctgctgagtacagtctggtgtggtacatccactgatccatgacgatgagaggtctctcaagctcgcccagatgggatacggagtcctctgtcagcacacagatgccatagcttgtgatgagctcagggataccgtggttgatttccgggtccacatggtacggacggcctgcgagcacgattccgcgtcgtccggtgtcttccatgtagtcgagcacttcctcgccctttcgctgtatctcaagccttgtcatggcaagctccttccagcctgcggctaccgcatcacgaatctgtgactcaggcaggttgaaatcaccctttgagaaggtggctacgagctgctgtgagatagtttcctcactctcaaatgacataaacggatttatgaatttaacctcgcctgatgtaatctcgtccacgttgtttttgatattctcagagtatgatgtgacaatagggcagttgtagtgattgtttgcatcaggaaactccttgcgctcatatggcactgccgggtagaaaatgaaatctacattttgttttatgagccagcttatatgaccatgtgtgagctttgcagggtagcactctgactcacttgggatggagtcgatacccatttcataaatctttctggtagactgcggtgacagtactacagaaaagccgagacgtttgaaaaatgtagcccagaacggatagttctcgtacatattcaatgctcttgggatgccgactgtaccgtgtggagcatcctttgggtcaagtggctcatagtcaaatatacgcttgttcttgtattcaaaaagatttgggatgttatccttgttcttctccttgcccagacccttttcacagcggtttccggtgatgtactgtctgttgtcggagaatttgtttatagtcagaagacagtggtttgtacagccctgacagcgtgcgagctttgtggtgtaggtgagctcgtttatctggtcgattgtaagcattgttgtcttgtaatcagcctcatggcgctcgcgtgcgatgagtgcggcaccaaaggcacccatgatacctgcgatatcaggccttgtggcatgtacacctgctattttttcaaagcttctaagaacggcatcattgtagaatgtaccgccctggactacgatattttcaccgaggtcgcttgcatcagaaagcttgataaccttgaaaagtgcattctttattactgagtaggcaagtcctgctgatatatctgcgacagatgcgccctccttctgggcctgctttacctttgagttcatgaaaaccgtacatctggttccgaggtcgatagggttctttgcaaaaagggcttcctttgcaaaatcctgtactgagtagtttaaggactttgcgaaggtctcaataaatgagccgcagcccgaagagcaggcctcgttgagctgtactgagtcgactgtctggttctttatcttgatgcacttcatgtcctgtccaccgatatcgaggatacagtctacctttgggtcgaagaatgctgctgcgtagtagtgggctacagtctcaacttcgccgtcgtccaattttaaagctgcctttaataaagcctctccgtagcctgtagagcaggagtgtacgatgtgtgcatcctcaggaagctttgcgtaaatctcctggatagaacggatggctgtagcgagagggcttccgttgttgttgctgtagaatgagtataaaaggtctccgtcctcgcttacgagagcgattttggtggtggttgagcctgcatctattccgagatagcagttgcccttgtatgtagaaaggtcaccggtctttacgtgattgttgccgtgacgcgttgtaaattcatcgtaatcagcctgatccttaaaaagaggctccatacgtgccacctcaaattccatctttatgccgtttgagaggcggtcgattaaggatgagagtgtggtgacagagttgtctttatagtttaatgcagagcctattgctgcaaacagatgagagttctcaggaacgatagtgtgctcgtcatcgagatttaaggttctgataaatgctgatttaagttcagacaaaaagtgcagaggaccgccaaggaaagcaacatgtcccttgattggcttaccgcaggcgaggccactgatggtctggtttaccacggcctgaaagattgaagcggataaatcctcgcgtgtggctccttcattgatgagaggctggatatctgttttggcaaatactccacagcgggctgcgatagggtagatggccttgtagctttttgcgtattcatttagtcctgtagcgtctgtctggatgagagaagccatctggtcgataaatgagcctgtaccgccggcacatatgccgttcatacgctgttccacgttgccgccctcgaagtatatgattttggcatcctcgccacctagctctattgccacatcggtctgtggagcatagtgtgtgagtgcggtagatacagctataacctcctgtacgaatggcacctcaaggtgctttgcaagagtgagtccgccggagcctgttatcataggacaaactgaaaggtcacctgtcttgtcgtaggcctttctgataagggactcaagtgtctcctgtatatttgcaaaatgacgctcataatcggaaaagaggatattgtcatcggcatcaagaagtgcaatcttgacggttgttgagccgatatcaatgcccaacttatgtaagctgttattttccatagtggttcctccataatgtattacttatatgtttttatatatctttcttcttattaaaatatataattgttctattatcaaaacagagattattatacgacagatatcgacaaattacaatgactataattataaagaatttgtgaataattcgcagtctcgttgacaaagtatgatttaactatcataataaattttgtaataaccgctgccctttgcactatagtgtaaaaggcagcaataatatgacaggaggatgcagatacgtggttttattgcatcgtgatgtaaccactgcttgtcacataatggtgtgagcagcagtgaaatgaaccatgtctgctaaaatgtatgaactggcttaacaaactagaacaaaaatatggaagtaaagcgattccgaatatcactagaatatttatcgctgcgaatctgataggcagtgtgctgcttttgacaaagggagatgttgtcctttattatctgcagttttcagcctctgctattttgcacggacaggtatggcgtcttataagctggatttttgtgccgagcggcagcatatcatttttacagcttttatttatattctgtctgtggacgcttggagacagcatggagtcatatcttggctcttttaggatgaatgtgtactttttcggaggctttttgctgtatgatatagtaggaatgcttgcatttgcagtgacacatgtatccatcaatctgactatgtactatatacttatagctatgtatctgatgcttggtcttttgatgccggaggcagaggtgaggctttactttgtgcttcctataaagatgaagtggatggtgcttgtttacttcgtgatgtttgcatatgatgtgtatacctatatgagctttggatggcagattggattggcatacggctcagaaatcgtacttgcacttataaatctgttggtattcatttatggctgcaagcacaggctctcattcagacagaatatgcaccagaagaggagaaaggcacagtttaaggctcagttttccgaacctcgcccgggaagtggcatctcacgtcacaagtgctatatatgcggcagaacggaattgtcaaatcctgaattaacattcagatactgctcgaagtgcaccggcaacaaggaatactgtcaggatcatctgtttacacatacgcacgtataatatacatgtactactttttctaattcattgacaaagtaaactgatgaatttataatggacacagtattattttcggaggaacatatatggagaacgaggcaacagtttcgaaaaattttattgaacagattattgagaaggacttggcagagggtcattgcaagacagtaaagaccagattcccaccggagccaaacggttatttacatatcggccatgcaaagtctattcttttaaactatggactggcaaagaagtatgacggacagttcaatctcaggtttgatgatacaaaccctaccaaggagcgtctggagtttgtagagtctatcgaggccgatgttaagtggcttggtgctgactgggctgacaggaagttttttgcatccaattacttcgacaagatgtatgagtgtgcagtaggactgataaagaagggaaaggcatatgtatctgatctgacacctgatgagataagagagtatagaggtacactcacagaggccggcaaggaggatccatactcaaagagaagtgttgaggaaaacttagacctttttgagcgcatgaaaaacggtgagttcgaggatggcacaaaggtgcttcgtgcgagaattgacatgagctcttcaaacatcaatatgagagatccgattctttaccgtgtggctcatatgacacatcacaatacaggtgataaatggtgtgtatatcctatgtatgattttgctcatcctatagaggatgctatcgagggtatcacacattctatatgtactcttgagtttgaagaccacagaccactgtatgactgggtggttattgaatgtggatttaagaattctcctgaggagtcgccaaagcagattgagtttgcaaagctctatctgacaaatgttgtaacaggaaagagatatatcaagcgtcttgtggaggacggcatcgttgatggctgggatgacccgaggcttgtttctatagcagcgctcagacgcaggggcttcacaccggcgtctatccagaattttgttgatctgtgtggtatatcaaaggctaacagctctgttgactacgctatgcttgagtattgtatccgagaggatttaaaggctaagcgccctcgtatgatggctgtgcttgatccggtcaaggtgattatcgacaattaccctgagggacaggttgagtatcttgaagtggacaataacgtggagaatcctgagcttggaaagagaaaggttcctttcaccagagagctttatgtggagagagaggacttcatggaggagccaccgaagaagtatttccgtatgttccctggcaatgaggtgcgtttcatgaatgcttattttgtgaagtgcaatagctgtgtgaaggacgaaaacggcaatgttacagagattcactgtacatatgacccggcatcaaagggtggcaacagtcctgatggcagaaaggtcaagggaactatccactgggtttcagccgagtatggaaagcaggtaactgtacgtctttacgagaatatcgtaaatgaggagcttggagtgtacaatgaggacggaagcttaaatcttaatccaaattcactcacagtgcttgataactgtgtagtggagccggagcttatgaatgccaaggcttatgacagcttccagtttgtcagaaatggtttcttctgcgcggattgcaaggactcaaaggatggacagcctgtatttaacagaatcgtctcattaaagagctcattcaagcttccgacagctaaatagtttttgactaaaaataaacagaagagaagaatagaggtaaaatatggatttaatgtcaggcattgacaaattcggtttaaatcctgaagacataaatgacctgtatgatgaggataaagcagctgccaccggggatgctccggtggcagctgctgttcagacagaggatgaaacggattttgttttcgcaaagaatataacatgtccggtgtgtgatcagagctttcaaaccctgacggtacggacatcaaagatcaggtttgctggctctgatgatgatttcagaccggtttacaagggaattgatacaataaagtatggtgtcacatcgtgtccgcattgtggttatagtgcgatgaatggcgactttgtacatgtatcgagtacacagataaggctgcttaaggagcagattgctgccaaatttaagccccgcagcaagtctgtgcccttgttatattcgtatgatgaggcaatagacagatttaagctggcacttttttcagcgattgttaaaagagctatgcatagtgaaaaggcatatatttgtctcaagctatcatggctttatcgcggtttaatcgaacagcttacggctgatggtatctcaacggaaagcaaagagcttgtaaatgcacaaaaggcagaaaaatattattataagcaggctcttgatggaatgacaagagcggttgagactgagcatttccctatatgtggtatgaatcaggatacggttgatttgcttttggctcagatgaattataagcttgaccatttggatgtggcttcaaagcttgttgcaagggtgcttatatcaaaaagtgcttctagacacattaaggataaggcacttgatttaaagaatgaaattattaaaaaaataagagatgtgaaataattgctgttatttcacatctctttttcttttatttgctgtaacaattaattgttcttcttgttctcaagctcaagaagcttcattgcacgcaccttgagtggcagaccaaacagtgtgatgaaaccgtctgcatcatggtggtcatataaatctcctgtagtaaagcttgcaagagactcactgtagagtgaatatggtgaagtagtgccggctttgatgatattgcctttatataatttgaatttaacttctccggttacatattcctgtgttgactctacgaaagcctggattgcttcacgaagtggtgtgaaccattttccttcgtatactacctgagcgagcttgttgcccatttcttttttgacctccattgtggcacggtcaaggcagagctcctcgagctggtcatgtgcctccatgaggattgttccacccggggtctcatatacaccacgtgatttcatacctactacacggttctcaacgatatcgatgatgccgatgccgtgcttgccaccgagacggttgagctctctgatgatgtctgctaccttcatctttttgccgttgacagatgtaggaacacccttctcaaatgtcattgtaacatactcaccctcgtcaggagcatgctcaggtgtgacacttaatacgagcagatggtcatagtttggctcctgtgaaggatcctcaagctcaagtccctcgtggctgatgtgccagaggttacggtcacggctgtagcttgaatctgtgccgaacggaaggtcaattccgtgtgccttacagtactcgatctcggcctctcgtgaatccattttccagttgtcctgacgccatggagcgattaccttgatatcaggagcaagtgccttgataccgagctcgaaacggatctggtcgtttccttttcctgttgcaccgtggcagatggctacagcgccttcttttcttgcaatctctacaagcttctttgcgatgcccggtcttgccattgctgttccaaggaggtatttgtgctcataaactgcgccggcctgtacacaaggtacgatgtagtcctcactgaactcatcacagatatcctctatgtaaagctttgaagctccggataatttagctctctcatcgagtccgtcaagctcctctccctgtccgcagttgatgcagcagcagattacgtcatagtcataagtctctttaagccatggaatgatagcagtggtatcaagtccgcctgaataagctaatacaactttgtctttcataagtgcgtgtcctcttttcgtttattctttatgatggtaaccattaactgcttttgtgtctaaaagccttgaataattactttaaaataaatatataccagttctttacatattgcaagtgaaaaaatatacattattcatgtataaatatacataattttgtataatttttctctttacggattgaaattactgtactatattattatgtatgatgcgtcagacccattttatatggttatgcagaaatacaatatgaaaagaggaaatactatgataaaggctggtattattggagccaccggatatgccggagcagagctcgtgagaattttgatgaatcataaagaggtagagattgcatggtatggctcacgaagctatgtggatgagaattatgccgatatctatggaaatatgtttcagatagttgatgcaaagtgcatggatgacaatatggaggagcttgcagagtcggttgatgtgattttcactgcgaccccacagggctttttggcaggcgtgctcactgaggatatattaagtaaggtaaagattgtcgatctgtcagcggacttccgtatcaaggatgtagccacatatgagaaatggtacaagattgagcacaagtcgccacagtttattgatgaggctgtatatggtctgtgtgagataaacagggacaaggtcacaaaggagacaaggcttgttgcaaatcctggctgctataccacatgctccatccttacagcttatccgcttgtgaaggagggacttattgatacagatacacttatcgtcgatgcaaagtcaggcacatcaggcgcaggacgtggtgcaaagacacctaatctgttttgtgaagtaaatgagagcatgaaggcatatggcgttgcctcacacagacatacacctgagatagaggagcaacttggatatgcggcaggaaaagaaatccttatcaactttactccgcatcttgttccgatgaacagaggaatcctcgctacagagtatgcgacacttaagaaaaagcctgatggaacacttcatacatatgatgagattaaggcagtttacgataagtattatgcaaatgagaagtttgtcagagtgctcaaaaaaggtgtctgccctgagacaaagtgggttgagggcagcaactatgtggatgtaaactttgtgattgatgagagaaccggcagaattattatgatgggtgctcttgacaatctggtaaagggtgctgcaggacaggcggttcagaatatgaatctgttatttggcttcgatgaggcagagggacttaatatggttcctatgttcccgtaataattaataataggaaaataattatcagaaagatgcattataatgctgatagttatataaaaatataaggatgatttaataaaatgagtaatgagaataaatatgaaataagggttatgacgatagatgactatgacgaggtgtacagcctctggcagaccattcacggctttggaatccgttctattgacgactcaagagagggagtccttagatttcttaagagaaatccgactacgagtgttgtagcggtagaagatggaaagatagttggagccatactctgcggtcacgatggcagaagaggctgcctgtatcatgtatgcgtggatgagcattacagaaagtgcggcatcggaaagagtatggtggttgcctgcatgagagcacttcaggcagagcatatcaacaaggtgtcaatcatagccttcaaggtgaatgagcttggaaaccacttctggaaggaagagggatggacattcagagaagacttaaattactatgatttcacacttaacgaagaaaatataacaagatttaacaaataaggagcagtacaatggcagataagaacatggaacaggtaatggaaaaggcacaggtgctcatagaggcacttccgtatatacagagatttaacagaaagattatcgttgtaaagtacggcggatctgcaatggttgacgaacagcttaaaaagcaggtgatccaggatgtcacacttctcaagctggtcggcttcaagcctatcatcgtacacggtggcggcaaggaaatcagcaaatgggtaggaaaggtcggcatggagcctgtattcgtaaacggactcagaaagactgatgccgatacaatggagattgccgagatggtactgaataaggtaaacaaatctctcgtcacactcgttgaggagcttggtgtgcaggctgtcggggtgagtggcaaggacggaggtctcttaaaggtaaagaaaaagtattcaaacggagaggatataggctttgtaggtgaaatcactgatgtcaatccaaaaattctttatgacctgctcgagaaggattttcttccaatcgtgtgtccaatcggtcttgatgacgaatacaatacatacaatatcaatgcagatgatgcagcatgtgctattgccagagcagtttcagcagaaaagcttgcattcctcacggatatcgagggtgtatacaaggacccttcagataagaatactcttatttcagagcttacagtctcagatgcaaagaagcttataggtgatggttttatcggcggaggcatgcttcctaagctcaacaactgcatagatgctatcgataacggagtttcaagagtacatattcttgatggacgtatcgcgcactgcttactgcttgagatattcacaaacagaggaatcggaacagctattcttggagattcggaggagaaatttaacaatgagcaataatatggataaacagtcatacattgatgaggcagaaaaggagcttcttcacacctacaacagattttcacttgtacttgatcacggcgagggagtacatctttatgatacagatggcaatgcatatctggacttcgctgcaggaatagccgtatgtgcacttggatacagcaatgagcaccacaaggaggcattaaaggcacaggttgataagcttttacatacatcaaacctctactacaatgcgcctgtcatcgaggcggcagacaaggtgcttaatgcaagtaaaatggaccgtattttctttacaaacagtggtacagaggctattgagggagctatcaaggctgcaaagaaatatgcctttacaagagacggccatgcaggtcatgagataattgccatgaaccattccttccacggaagaagcatcggagcgctttctgtcaccggcaatgcacattatcaggagccgtttgagccacttatgccgggcgttaaatttgcagatttcaatgatttagagagcgttaaggctcaggtgacagacaaaacctgcgccattattatggaaactattcagggtgagggtggtatttacccggcaaagaaggagtttatcgagggagtgagagctctctgcgatgaaaaggatattcttcttattcttgacgagatacagtgcggcatgggcagaagtggcgaaatgttcgcatggcagaactatgatgtgaagcctgatatcatgacctgtgcgaaggcactcggctgtggtgtgcctgttggtgcatttcttatgacacagagggtggcagacaaatcccttgcaccgggagaccatggcaccacatacggcggcaatccgttcgtaggagctgcagtaagtgcagtgtttgatgagtttaagcgtcttgatatagtaagccatgtaaaggaggttgcaccttacctggagaagaggcttgatgagcttgttgcaaaattcgactgtctcacagccagaaggggtatgggactcatgcagggcgtggagtgcagccttcctgtaggaaaggtctcagcagaggctttaaatcaaggccttatagtcattacggcaggcagcaatgtgcttagatttgtgcctcctcttgttatcgaaaagagtgatgttgacgaaatgatagaaaaacttgaaacaacacttgtaatactgtcaaaaagtctgtaaaataaagaggacatcgatttctcctttgagattatgatattaatcaaaggagaccatatgaaaaaaataatattattatgtgcgtttattttaacaatagcgtttggcctttgcggctgtaaaaaggatgatgccacagttcattttgcttctgaaacggagcagactgctgtggtttcaagtgatgtaaacagacatactgctgattccaaggagaagaaagcttcatccgatggagaacaggagcagaaggcaaaagacacagcagatgacactgatgaatctactgagtggtgcgtctatatctgtggtcaggttgccaatcccggtgtatacagagtaaagccgggcgcgagagtttgtgagctcgttgatatggctggaggcatgctggatacagctgacaaaagcttttggaatctggcatcagagctgtatgatgggcagatgctgtatttcccgactgtagaggagcttaagtcggatcacatacctgagggcacatataccaccggcatagatggctcgctgatgaagggcggcgctgaggagcatataggcgtaaaggatggcaagctcaatatcaataccgcaactgtcgagcagctaatggctctttccggaattggtgagagcaaggcaaagagtattgttgaagatcgcgccaaaaatggattgttttcttcgattgaggatatcacgagggtgtccggcatcggtgaagcgatgtttaataaaataaaagatgatataacagtaaattaggagtgtataaatggcaaaaaaagtgctggtcgttgacgacgaaaagttaattgtaaaaggaatacgtttcagtctgctgcaggatggcatggaggtagactgcgcatatgacggtgaggaggcctttaatatggcgaaggccaattcatatgatatgattcttttagatgtcatgcttccaaagatggatggctttgaggtgtgtcaggcaataagggagttttctgatgtcccgattgtcatgctcactgcaaagggcgatgacatggacaaaattttaggacttgagtacggcgctgatgactatatcacaaagccatttaatattcttgaggtaaaggccagaatcaaggcgatcatgcggcgtacttcaccggaacgcgcaccacaggtacagtcatctgtaattgaaaagggtgatatcaagctcgactgtgacagcagacgtctgttcataaacgataatgaaatcaatttgactgcaagagagtttgaactgctcgagattctgatcaaaaatgaaaataaagtgtacagtagggagagccttttaaagattgtatggggcgaggattacccgggtgacgtgcgtacggttgatgtgcatgtcagacgtcttcgtgaaaagattgaggcaaatccaagcgagccgaagtacgttcataccaagtggggtgtgggatattactacaaccagaagtaatactttcagaaaggttctaaaatgtttaagagtaaagtacattttgcattttataagagtctgaaatccaggctgattttcatgatttttgttctcgttctggtaccggaggtggtgctgtgcttcggcatacttaacacctacgagtccagagcggtttcaatccgcgaaagtgaagtgcttagtcaggcaaagattctcgcaaacaagatatccacaagtaaatactttgataaggatggcagtgacttgagcaatattgatgctcagattgacactcttactactatatatgagggccgtgtgctcatagttgacaagcattttaagattattaaggatacgtacaatttagatgatggcaatactattgtttcagaggaggttatcaagaccttctctgcttcagagattacaaactacgattctaaaaaccactatatcgagctttctgttccgataagcaatccaaacgacaaggattcaaagatagagggagcacttgttgtaagtgtgtcgacggacaatatatcgctaaatatgtcgtatctgacacagattgcggtgacggttgccattatcgcaggtgcggtggtgctcttttttggtgtgcttgttcttttgcacctttttgttccgattaagaagctttctgacgagatatcagatattaaggatggctttggaaaagagcagctggatgtagatgactatgcggagactgctataataagcaggaattttaatgagctgatgagcggaatgaaagtcatggatgagtccagacaggagtttgtatcgaatgtgtcacatgagctcaagacacctcttacttccatgaaggtactcgcagattccatcaacagcatgggtgatgaggctccgattgagatgtacagggagttcatgggagatatcacaagcgagatagacagagagacaaagataataaatgacctgttatcactggtcaagatggataagtcggctgccacgctgaatatcgagagtgttaatatcaatgacctgctcgagcagattatgaagagacttcagccgattgctgacaagcagcaggtggagcttgtactcgagagcttcagaccggtaactgcagaggtagatgaggtgaagctgacgcttgcttttacaaacctcattgagaatgcaatcaagtacaatgacaacgagaccggtggctatgttcatgtgtccttaaatgcggaccatcagtatttctatctgaaggtggaggacaacggtataggtataccggaggagtccttagagcacatctatgagagattttatcgcgtggacaagtcgcattcgagagagattggcggtacaggtctgggacttgccattacaagaagctctattcttatgcataggggagctataaaggctcacagtgtgatgggagagggcactacctttgatgtgcgtataccgctcaactatattgtataggaggcttgacgtgaaaagaataattatattcgtgctcactgcagtaattctgctctccatgggcggctgcacaaagaaaaaagcagataatacggttgaggtgttttgtctgaatatggatgttacgagcagcgtgccggagtcatatgtgcttagaagcaaaaactcagatgtggacaagcaggtggatgagcttctaggaagactgcaggataagcctgaagactcaagactgcgtaaggcgattccggatgaggtgtctgtgagaggtcatgacgagaaaaactataactgcactgtggatttcagcaaggagtattatgaccttacggctgcacaggaagtgcttttgagagcttctgtagtccgcacgctcacacagctggatagtatttcatatgtgacatttaccgtaaacagtattcctcttgtggactcggatgatgagattgtcggtagcatgggtgctgatgattttgttgagaatccgggtgagcagattaatacaagtgtgaaggagacactcacgctttattttgctgacaaggatggtacagggcttgaaaaacagaccagagtgatacattacagctcaaatatagcgcttgaaaagcttgttgttgagcagcttattgagggaccgaagggttctaagctcaaggcaactcttccgggcacaacaaagcttatcaatgtgtctgtggcagatagaatatgctatctgaactttgactcttcgttcagaaatactattgacaataagctgacagaggatgtggtgctgtattcgatagttaattcactcacctcacttcctactgtggacaaggtacagatctcgcttgacggtgagaatgacggcatgctgctttataattacaagctaagcgacatgtatgagtttaataaggatatagtggattctaatgattccacggaaaaaactgaaaaatagaatagattggattaggaggagaagagtattagtaaaagaccgatgtttttatttgcgttggtctatactgcaggaactgtttcaggtatgtatggcaggggctttggctttttggtttttgccatgctggttgtggctttaatagctgagtgtgtggtgtctaagggcagcctttccggtatagggcgcatagttgttttgcttattctgatatcgtcagctgtttttgcaacagcacaattcagatacgcttcagtggatgaaaaccgtgacagctatatgcagtatatgacagatgaaaaatctgtcatcgtctgggggaagatttataaaactgaatacaagtatttctcatacaggtattatatgacggactgcgtagtgcagcccgggtacggcaaggcttttggcagaaaaatatcctgtggtgatgtcgtggtatactgtgacagcaaaagcgcacatctgggcgattatatgaaagcttgcggcaagataggcttgtttaagtctgcaaccaatgagggagagtttgacagagcgcgcttttaccgctcgcagggaattgatttttcggtgaatgcagacagtattaggacaagcgccggtaaacatgcatggtattaccacatacttgaaaaacttcgtgatacgctgtcagcttcacttcttgaggtgactgatgagacaacggcaggagtgctttcgtccatgctgcttggagacaagtcgtatctggatgatgagataaaggatttataccaggtcagtggtatttcacatatactggctatttccggacttcatatttctatagttggcatgaccttttacaagcttctcagaaaaagaagggtgagctatacagcggcatttgtctgttctgcggcacttatactaagctatgctgttatgacaggaaatgccgtgtccacaaggcgtgccgtggggatgttcatacttacaatgcttgcggcagctttaggcagatgcacagatatgctcaattctctcggcatcatggtcatttacctgctgtgggacaatcctatggttttggaatatgccggatttgtgttctcggtaggggcaatacttgctataggtattgtgacacctgtgatgagtgcttctaagggcggtaaattctgggcatcagtatccatacagcttccgatgcttccggttgttgctatgaactattatgagctgcctctttttgcggtgtttgtaaatctcattgtgataccggctttgcctgtcgtatttatttcgggtctgcttgcgtctgccgcaggctgctttggcgtgatgcccggcaaactgctggtgtttcctgcatttgcggtgttaaagctctatgaggtgctttgcgatcttgttatgaagcttccgggggcatcggttatcacaggagctcctgatggatacaggattttccttttttatgctgttatgagtggctttttggtggcattttcgcttaaaaaacgtgccatagagtgtggcttaaaagaaaaaagccaaatcctttacagtgtccaaagagtggtgtgtacagcagtcctgcttgcaattttgcttgtgaagccaaaaactgctgcgcagcttgatatacttgatgtggggcagggagatggtatattttaccgctttgagtcaggcacatgcatctttattgatgggggaagctctgaccgaaaacagcttggcgagaatgtgattatgccgtttcttaagtataacggcatacagagtatatcatactggtttgtttcacatgcagacagtgatcatataagcggattgtctgaggtgatagacagtgggtatactatagagcatatagttgtggcagaagcggcggctaatgaggaagctatggaggagctgctttttaaagctaaggaagcagaaattgatatatgccttatgtcaaagggggattcgattgaaataaatgatgcatcaggttcgcgcagtactgcaaatgaagaagctgatggtatcatgtgcctgtatccgggaccttcggatactgccttagacagaaacgatatgtgtcttgtgctgaagctcacggatggcaggtttagtggtattttcggcggagatatatcatctgaggtagaaaagaagcttgttaatgagtatggggatgggctttctgtggatttttacaaggcaaatcatcatggttccaggtattcaagctctgcagactggattgaggctttaagcccaaggtgggctgcagtatcatgcgcggcagaaaaccgctatggacatccggctgatgaagccatggataggcttatggatgcaaagtgcagtattttatacacaatgcaaagtggtcagattaagtataaagagagtactatatatgaaaacaatagacaatgatataaaagcaggagatttcaaaaaggtttatctgctgtatggacaggagagatacctcataaaacagtacagggacaagctgataaaggctatggtcagtgagggcgacagcatgaacttttcatcgtttgagggcgatggaatcaaccagaaggagataattgacctggcggagacacttccgttttttgcggataaaagagtgattcttatagaggatgcaggcattttttcaaaggcaggcgatgagcttggagagtatttaaagaattcacctgagagcacgcactttatatttgttgaggagagcgttgataagcgctcaaagctttataaggcggcagccaagtgcggtaatcctgtggagttcaaggaacagacggatgagacacttgccagatggataggaatgaggattagaaaagatggaaagggcatgagtcaggctgcctacaacagctttatagaaaaaaccggcacagatatggaaaatatcgacaaggagcttgagaagctgctgtgctactgcatggacaaggacgtgattgagctttcggatgttgaggctgtaacgacagagcagatcacaaacaaggtgtttgagatggttgatgcgattgcatcacacaaacaaaagcgtgcgcttgagctgtattacgatctgctggcacttaaagagccggccatgcgtattatgtatcttatatcgcgccagttcaatatactgatgaatgtgaaagccatgacaaataagggctttggcaacaaggatatagcatcaaaggccggatgtccggagtgggcggtgcgcaaatatcaggcgcagtgcagggcatattcgctggatgatttaaagagggctgtgagagatggtgtggcatatgaggaggctgttaagaccggcaggatgaatgaccagatggctgtggagctttttatagtgcagtactctgcagatatgaccggcactcatacgacaggcagtaaatgatataacgcaaatatacaaaaaagcaaataaaaaaacccatcggtatgacggcaccgatgggtttattatttattgctatatagtaattaagctaatccgttaacaagctttgttaaacgagatacttttctggctgcgttgttcttgtggaagataccctttgaaccagcgcttgcgataacagaagttgcatcctttaatgcagcctcagcagcagccttatcatttgcagctacagcagcctcaaccttcttgattgctgtcttaactcctgatttgattgctttatttcttgcagccttagtttctgttactaaaattctcttttttgctgatttaatgttagccaactcgtacacctccaaatatttaatctaatgtatgccaaaacagacacggacgctttgacacaaacatactagaatataatatgtcaacctttctgctctgtcaatacatattttgaaaaaaattgcaaaaaattaacatatatgtgattttggaatatcatacaggggaggtgtattgatttgtcggctgataaatggtgtgcaagaactgatctggcgcttgagacgcaggagagccttaaaaaggcaaacacagatatgagaggtgtgaatttctctgaaaaaaagctggataatggaatcatagtcagtgtagtgacaattgactcagaaaatgcagtcagggctacaggccgtcctaaaggaaaatatgtgacaattgaggctgctatgctgtccgagggagatgaggagtgctgtcaggctgtgacaagggagctttcaagagagcttaagagctttgtaaaggctgtctgtgacaagcgtatatatgcggcacttgttgtcggacttggaaacagaaatgtaactcctgatgcgcttgggccaagatgcgttgacagcttgtttatcacccgccatatagtaaaggaatatggcaggtatgcgtttagcaacgagaatgtaaacagtgtgtgcggcctcgtgcctggcgtgatggctcagacaggcatggagtgccttgagataataaagggtgtggtgagcgaggtgaaacctgattttgttgtgacaattgatgcacttgcggcacgcagtacaaagaggctgggctgtacaatacagctgacggatacaggcatagtgcccggaagcggggtaggaaaccacagggacggtattaaccatgataatctcggagtgcctgttatcgcaattggtattccgacagtcattgatgcggtgaccattgtttcagatgcggtaaatgccagccgggagaacaccgcaaagctcatgtcgcctaagttaaacggcatgtttgtgacgccgaaggatattgacgagacggttaagagactggcagggcttttgtctgagggcataaatatggctttttcaaacgatgaatatgatgactatagtgaataattttattgcttcgaatatcattagagccagccgcataagctttatgtagcaggggctgcctgatgctttagatgggagatgatattgtgaagaaaaaaatgattgtgcttatagcatttatatatattgcgtctatgctgttttgcggtgatggtgtgggaaagaagttcgtggaagaaaaatttccgcaccttacatattctgacaaggagtgtgatgattcaaaaaagaatgagctgcgtattgtggaggatgaggatacagcaggaggtattctctcatacgaggagcttgctgcgatggaaaatgaaaatgcaagtgtcaggaacaatatgctgccggataccgaccagctggcatttgttgatgaagctgaaaaaaacggtgagctggcagaacttgaggagcagcagaacgtgaaaatgccgcaggtagatatgagctttgacaatcttgtaaaaaactattatcaggtggacaagactacatatataggagccgatgagctgtgtgaggacgttttgcttgggcgcgatatgtctatagaaaagtcaggcgacggtcctgatatactcatataccatacacattcgcaggaggggtacagtgattcccttgatacatcagagacagagaccgtagttggagtgggtgacaggcttgaatcacttttgagggaaaaatacggctacaatgtgctgcatcacaaggggcagtatgatgtgaatgaccgcgaccatgcgtattctaattcacttcctgagattacagagattattgagaaaaatccgtctataaaggtggttattgacctgcacagggatggagtggctgagactacaaggcttgctgccacaatagatggaaagcctatggcacagattatgttttttaacgggctgtgccgcactgctgcaaggggaccgattaatagtctgcccaatgagtatctgggggacaatctggcgttttcatttcagctgcagctcatggcaaatgagtattatccggggcttgcaaggcgcatatacttaaagggctacagatataatatgcatctgtgtccgaaatcgttgctcgtggaggtgggagcgcagacaaataccaaggaggaggcgtacaatgcaatggaaccacttgcagatatacttgataaagtgttaaaataatatagactttatttcacaaatctgataaactttgatgagttattgaaagtattaggaggacatatgtcaatagatcagagcaaaatccgcaatttttgtattattgcccatattgatcacggtaaatctacactcgcggacagaattatagaaaaaacaggcacacttaccagcagggagatgcaggctcaggtgctcgacaatatggatttagagagagagcgtggtatcacaatcaagtctcaggcagtccgtattatatataccgcaaaggatggcgaagagtatatttttaatctgatagatacaccgggacacgtggattttaactatgaggtatcaaggagtcttgcggcatgtgacggagctatacttgtagtggatgcggcccagggcgttgaggcacagacacttgcaaatgtttaccttgcactggatcatgacctggatgtatttcctgttataaataaggtggatctgccgagtgcgcgcccggatgaggtggcacaggagattgaggatgttatcggtatagaagctatggatgcaccgcgtatttccgcaaagacaggactcaatatagaggatgtgctggagcagattgtaaaaaagattccggcaccaacaggcgataaagatgcaccgcttaaggcgcttatatttgatgcaacatatgattcttataagggagtcattattttctgccgactgagagagggttctgtaaaggtaggagacacaataaagatgatggctacaggtgcatctgatgtggttacagaggtgggctattttggcgcaggccagtttataccatgtgatgaactttcggccggtatggttggatacattgcggccagcatcaaaaatgtcagggatacacgtgtgggtgatacagttacactcgttgacagaccgtgcgatgaggcgcttccgggctataagaaggtcaaccctatggtttactgtggtctttatcctgcagacagtgcaaagtatcctgatttaagggatgcgcttgaaaagctgcaggtcaacgacgcttcattacagtttgagcctgagacatcactggcacttggctttggcttcagatgcggattccttggtcttttacatctggaaattattcaggagagactggagagagagtttgatcttgatctcgttaccactgcacctagtgttatttacaagattcacaagacaagcggtgaggtgatagatttgaccaatccttcaaatatgccggatccgtcagagattgagtatatggaggagccatacgtatctgcagagattatggtaacaagtgactatgtcggtgcgattatgaagctgtgccaggagagacgaggagtctatatcagcatggagtatatcgaaaaaacacgagctctcataaagtacgacttgccattaaatgagattatctatgatttctttgatgctttaaagtcacgctcgaggggttatgcttcgttcgactatgagatgaaggattatgagcgctcagagcttgtcaagcttgacatcttaatcaataaggaaatggtcgatgctctttcatttatcgtattcaaggagagtgcatacgaaagaggccgtaagatgtgcgagaagcttaagggtgagataccaaggcatttgtttgagatacctattcaggcagcagtcggtggcaagattatagcaagagagactgttaaggcgcttcgcaaggatgtgcttgccaagtgctacggtggtgatatttcacgtaagaagaagctgcttgagaagcagaaggaaggaaagaagaggatgcgtcaggtgggcaatgtagagataccacaggaggcattcatgagtgtgcttaagctggatgaggagtaatcgcacatatgaagaatcttgagatttatattcatataccattttgtgtgagaaaatgtgaatattgtgattttttatcatttcccgcagacgatgatgcaaagcttcgctatgtcaaggggattatggcggaaatgattttttacggcccgcttatgaagaactatcaggtgtcatctgtctatatcggaggaggtacaccaagctatatagatgagcagtggattgctgctttgatggagggagtgtttgactgctttaatgtgctgcctgatgctgagatatccatagagtgcaatcccggtacgcttagcagggaaaagcttttagcatacagggatgcgggaatcaaccgcctgtccataggactgcagtcggcaaataatgatgagcttaagctgctcgggcgtatacatacctttgaacagtttgtgacgaattacgaggtggccagaaacgtgggctttaaaaatatcaatgtagatttgatgtatggtctgccgggacagtcagcgtcacagtatatggcgacagtaaacaagattataaggcttcatccggatcatatatcggcgtattctcttatagtggaaaagggtactcctttctatgaaaagtacaagtttgacatggtgcgccaggaggcgggcatgagaacggagtttctgcctaatgaggacgagttatatgatatggaaaaggcgggacagaaggcgtttatggatgccggctacaggcagtatgagacatctaactatgctaaaagaggtatggagtgccgccataatataggctactggaccagagctgactatttaggacttggaataggggcggcatcgcttatatcaaatgtcagatataccaatacatccgatatggacgaatatctgtcgcgctgccgtcatatacatgatgtgggtgatgatatatttaaggccaatctgcatgtggcagctgatgttatagacaaaaagggacagatggaggagtttatgtttcttggacttcgtatgaatgatggggtcacaagagaagcctttgagagggcatttggtatttcgatagatgcaatctacaaggatacgatagacagcctgaaaaaacaggagctgctcgtggtaaaggccgggcatatctatttatcggagagaggaaaggatgtagccaattacgttatggcacagtttttgaaggattaacggagagtaaattatggatatgacttttaagcttcaggtgtttgagggaccgcttgacctgcttttatacctgatagagaaaaataaagtaaatatttatgatatcccgattgtcgagattacagcgcagtacatggagtatgtggatcagatgaaaaaggataacctggacacgctcagcgagtttctcgtgatggcagctacgctcctcgacataaagtcaaagatgcttctcccaaagaaagaggaagaagagcaggagcaggaagatccaagagcagagcttgtgcagcagttgcttgagtacaagatgtacaagtgcatggcaaatgagcttaaggatcgccagatggatgccggcaaggtgtggtataagaagaaggacatacctgatgaggtccttgcatatgaggagcctgttaatcttgaggagcttgtcggagatatccgtctttctgatttaaacagaatctttcaaagtataatgaagagacaggaagaaaagatagataaggtccgttcaaagtttggaaagattgaaaaggaagaggtctccttagaggaaaagatggactttctgacagactatgctgcctcacacaagcacttcagcttcagagggatgcttaccgcatcgtcaagcaaagtggaagtcatagttacatttcttgccatactggagcttatgaagaccggcaaattaactatcgttcaggagcatatttttgatgatatccagattgagtcaagaattactgcataaagagggtttgaggatatatgaattataaagctgcaatagaggctattttatttaccatgggagaatccgtggagcttggaaggatagccgatgcaatacaattaaatgaaaaagaaacaaaaaagctgcttgacgagctgattaaggagtatagaagctcttcaaatataggtatgaatatcatagagcttgacggtgcttatcagatgtgtacaaagccacagatgtatgagtatctcatccgcattgcaaagcagcctaagaagagggtgcttacggatgtgtttttagagactctttcgatcatagcgtacaagcagcctgtaacaaaggcagaaatagaaaaaatcagaggtgtgtcaagtgaacatgccgtaagcaagcttgttgagtacaatctggtgcaggagcttggaaggcttgatgctccgggaaggccgcttttgtttggtaccacagaggaatttctaaggagctttggggtttcgtctatcgacgagctgccggtactaagccctgtgcaggttgaagagtttaagcaggaggcagaggaagagatgcacgtgaagcttgatgtgtagtgcaggtgtattgcgtaagctgccatttcatataataaggacatgcaaataatcatatatattaccgatggaggtaattatatgattatttttttgaaaaaatataagtcgaaaatagctttaatggttttcatttgtgtgttggtttgtactgtcagctgtttgcttgattttaagacgctggaaaagcaaaaaatgcccggtttggaaaagaaaagtgtgtttatggcggctgaaaatactgttgctaagaatactgacaaagccgtaaatgagcccaggcttcatgctgtttcagcagcattatatgatgcggatgacgagacgtttatatatggcagaaatatgagagacagcatggcaaatgccagcaccacgaagcttcttacgtgcattgtggcacttgaaaaagctgatataaatgatactgttacgatttcacaaaatgccgcatcacagcctgaggtcaagcttggacttgtggcagggaatagctataatatgaaggatttactctatggcatgatgcttgagtcgttcaatgactgtgcctatgcgattgcggagcatgtgggcggctcgacggagggctttgcaaagcttatgaatgaaaaagcaaatgagatagggtgccttggcacgtattttattacaccaaacgggctggatgctgagaatgatataagctttcaccactccacagcgggagatttgtgtgttataatgtcttattgtgcgtggaaatcaccaaaatcaacacagtttcttgagataacacagactatgcagtacacatttgagacaaaggaaggtcagatggtttttagcaatcacaacaggcttcttacggagacggactactgcatatcgggaaagaccggctttaccacaaaggcaggctactgctatgtagcagcagttgaaaaggatggaaggagaatgtgcctttctctcttgggctgtgggtggccaaacaataaaaactataagtgggctgatgcaaagagtctggtggagtatgcggtttcagatgctgccgaagattcttactgtgatgctgcttgtgtaacaacacaacagaccggtgatatacgaaacacaattaacttaaaatatatagaaaataacaagaaaaataagaaaatttgcaagaattttctcaagaattttacaattaatataggaaattttttctaaacaaaaataaaggttaaaaatttaacaaattagttgaaaaaaaattagaaatagtctattatcatactagcgaaaaattttatttttttatagatggaggatataaaatgagtagtaacaatcaaagcttggcaatgcagcgtattgctaagttagtcgacgagaacagtttcatggaaattggttctcttgtgacagctcgcagtacagattttaaccttactgcagcaaaagctccttcagatggtgttattatcggacacggtctgattgatggaaatcttgtatttatctacagccaggatgcaacagttcttaacggaacaatcggcgagatgcatgcaaagaaaattgcttctgtatatgatatggccatgaaaatgggcgcacctgttatcggatttatcgattgcggtggtatcagacttcaggagtcagttgatgctttagacggatttggtcttatctacgccaaggaagttgcagcaagtggcgttattccacagatttgtggtgtattcggtaattgtggtggcggactttctgtagtaccggctctttgtgatttcgcttatatcgaagagtctaagggcagaatgtttgttaatactcctgatgcaatagagggtaaccgtgttgagaaatgcgatacagcagcagcttcattccagagtgagaacaatggatgtgtagacggaattggttcagaggatgatattatcgctgatatcagagctcttgtcagcatgcttccactcaacaacgagggagatgtatatacagactcatgtgaggatgatctcaacagagcatgtaacagcatggctgatatgaaggctgatccaagattcctcttatcagagctttctgatgatcatgtattctttgagacaaagaaagactttgccaagaatatggttacaggttttgttaaattaaacggcatgacagtcggtgcagttgcaaactgcagcacagtatatgatgctgagggcaagaaggcagaggagtttgcactttctcttactgcaaagggctgcaacaaggcagctgagtttgtatcattctgtgatgctttctcaattcctgtacttacgcttacaaacgtaaacggattcaagaactgcatgtgctctgagaagaagcttgcaaaggctcttgccagaatgacatacgcattctcaagtgcaacatgtcctaaggttaacctgattacaggagaggcttacggaagcgcatatgttgcaatgaactctaagtcaatcggagctgatatggtttatgcataccctgatgcaaagattggtatgatggattcaaagattgcagctgagattatgtatccgggcgctgatgcaaaggaaatcgatgagaaggcagctgattacgagaagcttcagtcttctgtttcatcagcagcagccagaggatatgtagacctcatcattgatccggctgacacaagaaaatatcttgtaggtgcttttgagatgctttacaccaaatatgtagatgcaccagagaagaaacacggaactaaataatagaaaggcgcattttgttatgaagaaaaaaataacatatatccttagccttcttatgattgtatgtatgcttggagcatgtggctctgacaatgccgaaaagacatacggcggatacacaacagacgagcttcatactgaggcaacagacagccttggcaatatccagaactacattgcgctcgtagataattgtggcggttatgacaactatgagaagagtgtcaaggaagttgaggagaagacaggcatgacagagggtgaggttgtttacaacacactcggacagtcgggagcaagcgtttcaatgaaaaatatcgacgctgagcttgatgctgtttcatcatggcttgatctggttgacaaatacggagacgtaaaggatgcaactaatggcaaggattttacagtaaccaagtcaggtggtacactcactaccgatatgacacttacatttggcaagcaggatgtaacatacgaattagtatatgattcggttaccatggaggtaacaggtatctcacttactcctgttcagacaatggggcagaagcttgctaaggcaggacagaacacagtaatttcaatgagtattgtattctgtgtacttattcttatctctcttatcatttactgcttcaagtttattgctcttatcggcaataagccaaagaaggcagaagcaaagagcgagcctgaaaagaaagagactgctgcagctgcacctgctgcagaccttacagatgatacagagcttgtagctgttatctcagcagctatagcagcaagcgagggtactacaacagagggctttgtagtccgttcaatcaatagaagataatttaggaggacatttgagatgaaaaactatacaattaccgttaacggaaatgtttacgatgttacagtagaagagacaggaagcacacctagcacagcaagcacacctagaagagctgcagcacctgctgccgctgcaccaaaggctgctgcacctgcaggagcaggaagcatcaaggttgaggccggagctgccggaaaggtatttaagctcgaggctaaggttggcgatgcagtaaagaagggtgatacacttcttattcttgagatcatgaagatggagacacctgttgttgcaccacaggatggaacagtagcaagcattgatgttgctgttggtgattcagtagagtcaggtgcattacttgcaacattaaactaattccaggaggtaaactaatttgagttacgtaggtgaaacactttcaaacctcctacatcagactgccttttttaatctgtcagtcggaaactatgttatgattgccgtagcatgtgtattcctgtttttggctattaaaaaaggatttgagcctttacttttagtacctattgcttttggtatgctccttgttaatatctatcctgatattattgtaagcccggagcactcaagcaatggagtaggtggtttactttattatttctatacacttgatgagtggtcaattcttccttcactgattttcctcggtgtcggagctatgacagactttggtccgcttatcgcaaaccctatcagcttcttactcggagctgcagcacagtttggtattttcggagcttatttccttgcaatccttctcggatttaatgacaaggcagcagcagccgtatctatcatcggtggagctgacggacctacatctattttccttgccggaaaattaggtcagacaggtctgatgggacctatcgccgtggcagcgtactcgtacatggcattagtacctatcatccagccgccaattatgaaattatttactacaaagaaagagcgtgcaatcaagatgcagaaccttcgtcctgtaagcaagcttgagagaattctcttccctgtagtagttactatcgttgtttgtacactgcttccaactacagcaccactcgttggtatgctcatgcttggaaaccttttccgtgagtctggtgtagtacgtcagcttcaggagacagcaagcaacgcccttatgtacattgtagttatcttactcggtacatcagtaggtgcttctacaagcgcagagtcattccttaatatgagcacaatcaagatcgttatccttggtcttattgcattcatggtgggaactgctgccggagtactttttggaaagcttttatgcttctttacaaaaggcaagatcaatccacttatcggttcagccggtgtatccgctgttcctatggctgcccgtgtatctcagaaggtcggtgcagaagaggatccaacaaacttccttcttatgcatgctatgggacctaacgtagccggtgttattggaactgccgtagcggccggatgcttcatggctatattcggtatttagatttaattaaggaggattaatcatgtcagaagtggtaaagaaaccattaaaaataacagaaactgttcttcgtgatgcacatcagtcactgattgcaaccagaatgacaacagagcagatgcttccaatcgttgacaaaatggacaaggttggatacaacgcagtagagtgctggggtggtgcaacatttgatgcctgccttagattcttaaaggaagatccatgggatcgtctcagaaaattaagagacggcttcaaaaatacaaagctccagatgcttttccgtggacagaatatcttaggatatcgtccatatgcagatgatgttgttgagtatttcgtacagaagtcaatcgcaaacggaatcgatatcatccgtattttcgactgcttaaatgatatcagaaacttacagacagcagttacagcatgtaacaaggaaaagggacatgctcaggtagctctttcatatacacttggagatgcttacacacttgactactggatggatatggcaaagagagttgaggacatgggtgctgactcactttgtatcaaggatatggctggtcttttagttcctgcaaaggctacagagcttgttcaggctttaaaggattctacaagccttcctgtcgagcttcatacacactacacatcaggtgttgcttcaatgacatacatgaaggctgttgaggccggagttgatatcattgatacagctatgtcaccattcgctcttggaacaagccagcctgcaacagaggttatggttgaggcattcaagggcacagagtttgatacaggtcttgatcttaatctcttaagtgagattgctgattacttcagaccaatgagagaggaagccttagcttcaggtctcatgaacccaaaggtactcggagtaaatatcaatactctccgttatcaggttcctggaggaatgctttcaaaccttatctcacagctcaaggagcagggcaaagaggacaagtacgaggaggttctcgcagaggtacctcgtgtgcgtaaagacctcggtgagccaccacttgtaactccttcttcacagatcgttggtacacaggctgtatttaacgtactcatgggcgagagatacaaggttgctactaaggagactaaggatatccttcttggtaagtatggtcagacagttaagcctttcaacccagaggttgttgacaaggttcttggtgatgataagaagaatgccatcacatgtcgtccggcagatcttcttgagcctgagcttgacaagattgaggctgagatgaagcagtggaaacagcaggatgaggatgttctttcttatgctcttttcccacaggttgctactgatttcttcaagtacagacaggcacagcagacaggtgttgatgcaaaggccgctgatactgagaataaggcttatcctgtatagtatttaaaaatataattcattcttttgaatttcaagcaggtccggctttgccgggcctgttttttatattatgtggatagggtgactcgtaagtccagggcgccggaaaggcatgcacactttcatgtgcgcgaatagcgcagcctcttagatactgtagaaattatgtccatgaaacacagaaatgtcctgccatggacggcaggacaaggtgttatgcgccatggatggcgcataaaagccggtttcgtcaagcatagaacaactacaaacataatttcgtacagtatcttagagacgtagcgtagcgcacgggaaagtgtgcgtgcctgcccggtgcccgggacttacgagtctattctatggcaaaaataaaaaatataaattcgctctttcatatagaggaaaaaagtgataatattttaaggtatgaaaaaattgctgcaggtcacacaaatgtgtgaagcacagccataaacgggaaagctcaggagtatatgatgtcaaatactaacgacttacttaacaggataaatgctaaatacagtacgatgagcaaggggcacaagctgcttgctacatacataactgataattatgataaggctgtctttctgacagcggctaagatgggcgagacagtagggatttctgagtctacggttgtcaggttcgctacatcgctcggatataagggatatcccgattttcagaaggcgcttgaggagcttgtaaggaacaagctcaattcggttcagcgaatggaggttacatatgggcgtatcagccagtcacagattcttgagactgtactgcagtctgatcgtgacaagattaagaccactctggaaaaaattgatgcggatgcatttgacctggcggtagatactattttacagtcaaggaaaatttatattgttggaatcagaagctgtgcacctcttgcaagctttcttgcattttatatgaatctgatgtttgaggatgtgtgtctgcttacgacaaacagctcgagcgagctttttgagcagatggtgcgcattggcaaggatgatgtgattatcggtatcagctttccgcgttattctatgcgtactcttaaggcgttagaatttgccaacaacaggagtgcaaaggttatcactatcacagacagcattcattcaccgatgaatctgtattcttcatgtaatctgattgccgacagtgatatggcctctatagttgattcacttgttgctccgctttctgtcatcaatgccctgattgtggctctttgcatgaaaaagcagagtattgtcgcaaagacactgacagagcttgaggatatatggaatgagtatcaggtgtacgagaatgatgagattgattacattgatgactctataaaggtacattacgctaagctgggggattcgcaggatgagtaagaaaattattgtggtaggtggcggagctgccggaatgcttgcggcgtattttgctgcagccgcaggaaataaggttacgcttcttgaaaaaaatgaaaaacttgggaagaaaatatatataaccggcaagggcagatgcaacctgaccaatgcgtgcgatgtcgaggagctttttttaaatgtaaagagcaacagtaagtttttgtacagcgctttttatggctttgacaacagcagggtgattgatttttttgagagtcatggcatgcctgtaaaggtggaacgtggcaatcgtgtatttccggtatctgataagtcgtcggatgtgatttttgctttacagaaagctttgaaggaaaagaatgtggaggtattacttcacacggaggtatcaaagctgtgctatgagaaaatcactgatacaaaggcagatgaagaagctagtgataaaaagcctagtgataaaaagcctagtgataaaaagcctgaattaaaaataacaggtgtcatattaaaggatggcaccaaaatggatgctgatgcagttattgtggccacaggaggactttcatatccttctacaggctctacaggtgacggctacaaaatggcagaaagcgcaggtcatactgtgacagagtgcacaccgtcgcttgtgccatttaatgtaaaggaagagtgggtaaagagtcttcagggactttcccttaaaaatacggctatttccatatatagcggcaaaaagaagctttatgaggattttggagagatgctctttacgcattttggggtcagcggccctatgattttgtctgcgagtgcatcaattaagcaaagccttattaagcagcctcttgacatgtatattgatttgaagccggctctcacacaggaggccttggacaagaggattctcagggagtttgaggaggcaaaaaacaagcagtttaagaattcgataaacaagcttttgcctgcaaaaatgattccggtgataattgagctttcaggcattgacccggataagaaggtcaatgagatatcaaaagaggaaagaaacagacttcttatgctttttaagaagctgcctgtcactcttaatggtccaagaggatataatgaagctattatcacaaagggcggcataaaggtgaaggaaatcaatccatccactatggagtcgaagcttgtgaatggcctctactttgccggcgaggtgctggatctggatgcatacacgggaggcttcaatctgcagatagcatggtccaccggatatctggcaggaacaagtgcagcggtttgatgatttggaaaactattttgagacacttataataacagttatatatgcacatagtgaattgagcagctgggattttaataaaaatgatgaacaataatattttaaggagaaattatgagatacaatatagcaattgacggaccggcaggagccggaaaaagcactatagcaaagagacttgcaaaggaacttggcgcaatttatgtcgatacaggtgccatgtaccgtgccatggcatactattttatccaaaagggtgtggacaaggatgatattgacaccatcacgaagctgtgtaaggatgttgaggtttctatcagctatgaaaacggtgaacagcaggttatcttaaatggtgagaatatcacatgctttataagacaggaggctgtcggcaatatggcatcagcaacaagtgtttatcctgtagttagagaaaagcttgttgaacttcaaagacagctcgctgccagagaaaatgtggtgatggatggaagagatataggaactgttgtgcttcctgatgccaatgtcaagatatttttaacagcaagctctaaagtacgtgcaaagagacgcttcgatgagcttactgcaaagggtgagaaatgcgatattgatgcaatcgagaaggatattatagagagagaccacagggatatgacaagagagacatcacctttgaagcaggcggatgatgctgtgctgcttgattcgtctgatatgacaatcgatgaggtggtagatagaatgaaacagcttgtgaaagaggcatagcgtatgggagagcttactatcgcaaagagcgccggcttttgttttggagtgacgagagcagtaaatatggtctatgaggcaattgaaaaggaaaatgtgcctatatacacctatggcccgattattcacaatgatgaggtcgtaaaggatatggaaaaaaatggcgtaaccgtcataaacgatctcgatgagctttcttctcatgaaaagggtgtgatgattatccgttcacacggtataagcaaggctgagtatgacaggataaaaaactgtggctttgaggtgcttaatgcaacctgtccttttgtatcaaaaattcacagatatgtggaggattacagctcaaagggctatgatattataattgtcggcagtccaaagcaccctgaggtgtgtggaataaagggttgggcagacgaaaaatgtcatgtaaccatcataaattcgcctgaggatgccgaaaattacatgaaaaatagtacaaaaaaactatgcatagtgtcacaaacgacatttaactacaataaatttcaagatatagttgaaattattgcaaaaaaaggttatgatataactgttttaaatacaatctgtaatgctacagaggtcagacagaccgaagcaagaaaggtagcacagtgctcagatgtcatgattgtcataggcgacaggcacagctccaatacacagaagctatttgaaatatgtaaaaacgaatgcaaaaatacttactatatacagacaagtgacgaaatggattatacacaaatcaggtccaacaataacgtaggtattacagcaggggcttcaaccccaaataatatcattgaggaggtttcaaagaatgtcagaaatgagctttgaacaaatgctggaagaatcttttaaaactataagaaatggagaagtggtagaaggtaccgttattgatgttaaacctgacgagattttcttaaatattggatacaaatcagacggaattattactagaaacgagtacacaaatgagccgaacgtagatcttactactgttgtaaaggttggcgacaagatggaagccaaggtagttaagcttaacgatggcgagggccaggttatcctttcttacaagcgccttcaggcagagaagggcagcaagcgtcttgaggaggcttttgagaaccaggaagtattaaaggcaaaagttacacaggtattagccggtggtgtatgtgtcagtgttgatgagacaagagtattcatccctgcaagccttgtatcagatacttatgagaaggatctcaacaagttcaaggatcaggagattgagtttatcatcacagagttcgatccaagaaagagacgtattatcggaaatagaaaggtattactcgttgagcagaaggctaaacagcaggaagagcttcttgcaaatcttcacgttggcgatgtaatcgaaggaacagttaagaatgttacagatttcggtgcattcatcgatcttggcggagtagacggattacttcatatctcagagatgtcttggggcagagtagagaaccctaagaaggtattcactgttggacagactgtaagagtatttgttaagaacatcaatggttctaagattgctctttcaatgaagtttgatgacgagaatccatggaatggtgcaacagagaaatttgctcctggcaatatcgtaaagggcaaagtagccagaatgactgattttggtgcattcatcgagcttgctcctggtgttgacgcacttcttcatgtttcacagatttcaaaggatcatgttgagaagccatcagatgttctcaagattggtcaggaggttgaggctaaggttgttgagttcaatgaggacgataagaaaatcagcttaagcatgaaggctctccttgattcagaggatgatggagcagatgttgcagatgtaaatatcgatgaggttgcttctgataacgagtagtttttgattttaaagctgtcatatataattatatggcagcttttatttgtatcgggtggcacatattggaggattgtgatgtttgatcattatgaatggtttaaaaatgaagtgtacaggctgacgcagatagatctcaattattataaagaaaagcagatgcgcaggcgtattgatactcttgcgaaaaaaaacggggctgattcttatgagacatacattgatatgatttctacagataaggttaagtttaaacagtttatcaattttatcactatcaatgtatctgagttctacaggaatcctgatcagtggagttttttggacagagaggtcattcctgagatattaaagaacaatacagggatgattaagatatggagcgcggcatgctcaacaggggacgagccgtattcgcttgccatggctttttcgaagcatgttccactgtctcgtataaagatactggctacagatattgacgaccaggtgattgcgagtgctaaagccgggctttacagcgcaaagtctgtagaaaatgtgccggctgacctgaagatgaagtactttaccaaggtggagggctcatacaagatatctgatgatatcaagcggtgtgttacctttaaggagcacaatctgttgaaggattcatatccaaaggattacgatcttatcctgtgcaggaatgtggtgatttattttaccgatgatgcgaaggatatgatatacaaaaatttcttcaatactttaaaatccaagggaatactgtttataggcagtactgagcagataactacatatcgtgagctcggctttgagagattaagcagtttctatttcaggaagccatgatatcttatcagaggttaaacagatggtctgttatatgttttacatatgacagtaccatctgttttgaatttataaaatcttcagtcagcaggaaatagctgtacttatcctttatatcgaatcgaaactctggcttcatgaagtcagagtactgtctgatgaaggtaccggttttgcgcacatagcagttgtacgccttgcatttttcgcggtattcgtggtcgacatatgctgcgacgctcttgtgtatggccatgtcctcctttggcagatagtagtagtttttgtaatcactgtaaaaatggcgcatttccccctcgaatatctctgcacgcacatagctttttgtagtgccgatggtcagatagatgtcattgtcatggaagcttacagattttggaacggaaaatttattttcaaatgatatgataagctcattcatcagactgccgtcgtaagctgtatatgggtttacggatacaccggtgatatctgcaatgccatgtatgcattctttatacgaaagtatactaaggagctttgtcatgccaaggacatcctcgtagttgtgtgtcaaaagcagggatagcttttcgtcgtccttttgggcaagatattcataataaacgtttatgagttcaccaccggaatatttatcctccctatctataccaagaaatgcttcgatgcttttttgtttgtagttttcgaggcacaaaagaggctttatcggtgaaagctccttaaagatatcgagtatctgcacattacagaaggggtcttcctgcttatatttcttgtatttattctttaaaaatggtatatcaaaaccgacgccattgaaggatatgatagtgctgcaacctgacagacttcctgcgaaggcttcaattacagctgcttcgtcatcgacagattcggcaaaatactggtctattacaatacgatttttaatgcgccttgcacagcctatcatgtatacaattgctttcaccggtgaaaagcctgttgtctcaatatcaaagaacatagtgttttctttaaatatgctgtctgaaaaattatcggtttttatgtaaatttcttcattatgaaatattttcattttcgattcctgccttgaatatcatttgtataaacattataacataaagtattaaaaaaagtacataatatactatttaactaaaaatcataagtggtataataggaatagtaatgtgcaatagcatttccacgttattaatctaaaagaaagaggggcacaaaaatgggtcataaaacgtttattggcggtgttcatccatatgatggcaaagagctgtctaaggattcaccaattaaagaagttttgcccaagggcgacatggtatatccggtttcgcagcatatcggcgcaccggctaagcctgttgttgccgtaggtgacactgtgttgaagggacagatgatagcagaggccggtggctttgtttcatcacctatctattcatcagtgtcaggaaaagttaaggctattgagaagcgacgtgtggcggtcggcgatatggttgacagtattgttatcgaaaatgatggcatgtttactgagacaacatatgagagcgtcgaggatgtcactgcgctttcaaaggaagaaatcatcgagaaggtcaagaatgcgggagttgtcggcatgggcggtgccggtttccctacacatgtaaagctttctccaaaggagccggacaagattgagtatattatcgcaaactgcgcagagtgtgagccttacctcacatctgactacagacgtatgcttgagaatcctgaggaattaattggcggcatgaagatcatacttcagctttttgacaatgcaaagggtattcttggtatagaggataataagcctgactgtatcgaaaagctcacagagctcacgaaggatgagccgcgtattgaggtttgtccgcttatgacaaagtacccacagggtggtgagagacagctcatctatgctacaaccggcagagctatcaattctaagatgctccctgctgatgcaggctgtatcgttgataatgtagagacaatcattgctgtctacaatgccgtaaagaatggacagccagtccttaagcgtatttcaacagttacaggagatgctgtgaagaatccttccaatattttatatagcatcggtacctcatatcaggagctggttgatgctgcaggtggctttaagagccagccggagaagattatatcaggcggtcctatgatgggctttgccatgtttagtcttgatatccctactacaaagacctcttcatcaatactgtgcttcacacatgatgaggtggcagcatttgagccacaggcctgcattaactgcggtcgttgcgtggaggcatgtcctgagcagctcattccaagccgtcttgcgaagtttggtttgcgtggacagatggatgagtttgagaagtggcacggacttgagtgtattgagtgtggaagctgtacatttgcatgtccgtcaaggagacaggtggctcagcctattaagacaatgaagaagcttgttctcgctgaaaagagaaaacaggccagcaaaaaataaagaaagaggtggattaaagtgagtgatttatatcatgtttcatcatcaccacatgtacgtgccaaggattccactgacagaataatgctttatgtcattatagcattactcccggcaagtctttttggtatttacaattttggatttagagcactttttatcattctgcttaccatcgcatcgtgtgtggcatcagaatgggtgtttgactacatagttaagaaaaagagcacaattacagaccttagtgcggtagttacaggactgcttttagcactaaaccttccggtttcacttccatggtgggaggctgtactcggtggagtatttgcaatcatcattgtcaagtgtatgttcggaggactcggacagaactttatgaacccggcacttggtggaagatgcttccttctcatcgcatttgcggctgatatgactaatttcaatgtcacaagaaacggtgtggatgtatactcaggagcaacaccacttgcgctcatcaaaaatgaggggctttcaagtgtcaatgtaagggatatgcttataggaaatactgcaggaacaatcggtgagacatcagttatagctattttaataggtgctatcatcatgattttacttggagtcattgatttaaagattcctgcatcctacattattacatttgctgttttcatgttccttttcggagcacagcagtttgatatcaactatgttgttgcagagctctgcggtggcggactgatgctcggtgcatttttcatggcgaccgattatgtcacaagcccgattacgccgatgggcaagataatattcggtatctgctgtggtatattgacaggagtattccgttgcttcggcgccaatgcagagggtgtttcctttgctatcatcttaagcaactgccttgttcctattattgaaaaggtttctatcccaagagcctttggtatggtaaaggaggcaaagaagaatgaataaacgtattgtacatgacgctttgattttaactgcctttactctggtgcttggttttattcttgccctggttcagggaatcacggcagagcctatcgacaaggccaataaagcagcagcacagaaagcatatcaggcagtattttcggatgcaaaatcatttgagaaatatgattatgatgctgatgaagctgataagcttgtatctgatgcgggctacaaggatacaatcgatgatattgagactgcccttgattcaaacaaggaggcattaggctatgtcatcacagttacagccaaggatggtagccagggaagtatcacattctctgtaggtatcaagaatgatggtactgtaaacggttactcgatcacaagcatcagtgagactccgggacttggaatgaaggccgaggaggctgatttctacaagcagtttgagaacaagaaagtagacaagttcgacgttgtaaagaccacaccttcaaaggatgatgagattgaggccatcacaggctcaaccatcacatcaaaggctatggccaacggctgcaacgcagctattacttacttccagaataaattacagggaggtgccaactaatgaacaaatatgtagagcgtttatataatggtatcattaaggaaaatcctacctttgtacttatgcttggtatgtgtcctacactggctgttacatccagtgcggtaaacggacttggaatgggactttccaccacggtagtacttatatgttcaaaccttttgatttcacttttcagaaaagtgattcctaacggagtgcgtatgccggcgtatatcgtcatagttgcatctcttgttacagtagtacagtttttaatgcaggcttatctgcctagcctttcagcagcacttggtgtatacatcccacttatcgtggttaactgtattatcctcggacgtgccgagagctatgcttcaaagaatccgcctgtagagtctatctttgatggaatgggaatgggacttggatttaccatgggtcttacaatcatcggacttatccgtgaaatcttaggtgcaggaacattcttcaacatcaagattttcggtgactggtttacaccaatcacaatctttatcatggcaccgggagctttcctcgtactaggcttcctcgttgcaggcatgaatatcatccgtaaaaagatggaagcaaagggtacacctcttgcagagccggcaggctgcctttcaggagactgtgcacattgtggagcatcatgtccatcagcaaaagcagcacaggctgctgttgcgcctaacactacagaaggaggggataaataatgggtacattaggtcatttactgctcattgcagtagcatatgcaatagttaacaacgtagtacttagccagttccttggtatctgtcctttcctcggcgtatcaaagaacacaaaaactgctgccggaatgggtggtgcggtaattttcgttatcacaatcgccacattcgttacacagcttatttacaattttatattgtatccgcttaatctgtcatatttacagactatcgtgttcattcttgtaattgcagcacttgttcagtttgtagagatgttcttaaagaaacagatgccgcctctttacaaggcactcggtgtgtatctgcctcttatcacaacaaactgtgccgtactcggtgtagcacttaacagtgtaacaaagggctacaatatcttagagagtgtagtttacggctttgccacagcttttggtttctttattgccatcgtgcttatggctggtgtacgtgagaagattgagtataatgatattccaaagcctttccagggaacagccatcgtgctccttacagcatgtcttatggctatcgcctttatgggattctcaggaatggtttctgtataggattggaggaaaagtgatatgaatgttactgcgattattattgcagctttagttgttggagctgtcggtataattcttggatttttcctcggtatttcaggagaaaaattcaaagtagaggttgacccgagagaggaagcaatacttgaagtgcttccgggcaacaactgtggtggttgtggatatgccggatgctccggacttgctgccgccattgcaaagggagaggcaccggtaggacagtgtcctgttggtggagaccctgttgcggcaaaggtcagcgagattatgggggtaaaggttgaggccggagtaaagaaggtcgcatttgttaagtgcgccggcacctgtgacaaagcaaatacagactatgactacacaggagtagaggattgtgttgccatgtcgtttgtaccgggcggcggacctaagtcatgtaattatggctgcctcggctatggaagctgtgttaaggcatgtccttttgattcaatccatgtggttgacggagtggcatgcgtcaatccgcttacatgcaaggcctgcggcaagtgcgtagaggcttgtccaaagcacctcatcgagcttattccatatgacacaaagcacgttgtaaagtgcagctcaaaggacaagggcaaggatgtcatgaaggcatgctcggttggatgtatcggctgtcatctgtgcgagaagaactgtccgtcagatgctgtccatgtagtagacaatgtagcttatattgatcaggagaaatgtacaggctgcggaatctgcgcagagaagtgtccaaagaagattattttataatgcataaaagctgttacatatcattatgatgtgtggcagcttttttataagcttgcagctattctgtgcttacgctatattcatctgatgtcgtgataatactataatcatctgtcacaaatattgcctcaacaccggaaagggaattgataagctcctttgctttatcaatgccaagagcgaagcatgtggtgcttaaggcatctccgtcgcaggaggagtcgcttatgatggtgacagagtacagattgtttttgacaggatagccggttgtggtgtccagtatatggtgatatagcttgccatctactctgtagtaccgctcgtagatacctgaggtgacgacggatttgtccttgattttgacggtacatatgggctcaccactctcgtcgaagggcttttgtatgccaactgtataatcacttccgtctgatttttcaccgactgtgaggacattgccacccaggtttatgatgcctgaggtgatttttttggactgtaaataagccttcatcttatcggcgataaagcccttagcgattccaccaaggtcaagctttgcttttgaatcggttagcatcacatcgtttccgttaatctgtatattgcggtaatttacatgtgacagctcgctttgtatctgcgcatcagacggaacgactgatgcatccacctcattatctttagagtcggtattttcagctatttcggaaaaattccacaaatcagacagctttcctatagtgatatcaaacctgccgtcacttgtgtcgccgtattcgatgcccttttttatgagctcaagagtatcattgcttactgttacatattctttgccggcagcgtcatttattttgctcacctctgagtaactaactgtgtttgacagcatatcctcatatttctttgccatatcaaagcagtcgtctatgtatttttcgtcggtagtgccataaagcgtaatctgtattatcgtgtcaaagtagaagccttgttttgaaaccttctgctgagccttgggctttaattcacatgcagacagacttcctgttattgtggcaagcgccaaaaggacagggacaaggtgttttagtttatttttcataatgcatcctttattaatttcctggttgtaaattatttatagttaaagcttaaatagtaaaagcataaatataactttgcgtccgggctttatgaaatttaaaaccgaaagcaacagaaatataataacacaaaataaaaaaatgagacagtagtaaaaatgattttgtattttgtatgaatatatggtaaagtagtaaatgtatgcgtaatgtaattatgtatgcatttagacttacaataggaaagatgatagaaatgagttttttggacaattataaaagagtggtaataaagataggttcatcgacgctgacacatgcagagacgggaagcctcaatttttcaaagatggagcgtctggtgcgctcgatatgtgattacagaaacagcggtatggatgtgtgcctcgtaagctccggcgccatcgcggttggacgtgatgtgataggcataaaggagcgcccgagcgatatttcaataaagcaggcatgcgccgcagtgggacagggcaggcttatgatgacatatcagaagcttttttccgagtataatcagaattccggacaggtgctcatgacaaagaataccatagtcaatcctgtttcaagacgcaatgttatgaatacatttgaggagctttttgatctgaacgtggtgcctattgtcaatgaaaatgatacggtaagcacatacgagatgcagtttggtgacaatgatacgctgtctgctattgttacatcaatcacgaaggccgatctgctcatactgctttctgatatagacggactgtattccgacgatcctcatgacaatccggatgcaaagcttatcagagaggttgatacgcttgacaggaaaatacttggcatggcaaagtcatcaaccggcagcgatgtcggaaccggcggcatggcgacaaagcttacagcggcaaagattgccacatattccggtgccgatatgattatcgcaaacggcggcaatatgggaattttatatgacattatgaatgacagatatacaggaacacttttccacagggcaaaggatgcagagtttgtgcttgcggattatatacaaagagagatggcacctacatctacaggcggtcagtaatcagctataaatttgaaatcaggagagtactatgacacaggaaaaaatacagcgaatcaatgagctttacagaaagtcacaggcagagggactttctgaggcagagaaaaaggagcaggatcttttgcgcaaggagtatatagcaaacgtgaagaagaatttaagaaaccagctcaacaatatcgatatggtaaacgatgacggttcggttgagaacctcggcgagaaatatggaaataaaaaaagaaattcgtagcaggcttaaaaagcaaagaggccttctgggtgctgatgagtgccacaacatgagccatgaaatttataaaaggctcatagctttagagctcgacagggaatatgacaacatacttttgtattcagctatcagaaatgaagtgaatactgatgagtattttgcctatttaataaacaaagcaaaaaggatatattatccgagggtttcgggcgataaaatgtccttttacagggtaagaagccttgatgagcttaattgtggttcatttaatattaaagagcctgatatgacgaaggagtatacgcaggcggatggcagggcgcttatgatagtgccggggcttgcattttcggataccggttacagaatcggttatggaaagggcttttatgacagatatttatcgtcttttacaaaaagagatactgtcatggcagttggcgtgggctacgatttccagttacttagcagcatgacgtttgaagatgaatatgacgtacccttagatggggtgataacagataagagagaggtgtttattgatgaatgatttagaaaaaatttgtgcggatgcatatgaggccagggtaaagataggaacactggatacagatatcaagaataaggtattaaacgatgcagcggacaatctgcttaaggcagaaaaagaaatccttgaggcaaacaaaagggatgtggccacagcagaggaaaatatgaaggcaaagagcatgattgacaggctctcgcttgatcatgacaggctccttggcatggctgacggactcagacagatagcaaagcttgcagacccaattggggaagtaatgtctatggcaaagcgccctaatggccttattatcggaaaaagaagagttgcaatcggtgttgttggcattatctttgaggcgcgcccaaatgtcacatcagatgcctttggtctgtgctttaaaaccggcaactgtgtcatattgaagggtggaagtgatgcgataaataccaatatcgcaatagttaaggcactaaaaaaggccttaacggacaatttggtttctgctgctgcacttgcacttattgagtcaacagacagagagacaacaaatgcgtttatgaagatggatcagtatgtagatgtgctcataccaagaggtggtgcaggactcatccagaatgttgtcaaaaatgctacaattcctgtcatccagaccggtacaggcaactgccatgtatatgtggacaaggatgctgactttgatatggctgttaatattattaacaatgcaaagacacaaagaatcagtgtctgcaatgcatgtgagtcgattgtagtacacagcgccatagcagaggaatttttgccaaagctgtatgataagctaagagagcatcatgtacagctgcgctgtgatgaaagagcacaggcaattcttgccggaagagacgatgtgacagaggcggcttccgatgactggggtatggagtaccttgattacattatgtctgtaaagattgttgacagcattgatgaggcaatcgagcatatcaacagatacaacacatcacattcagaggcaatcatcacaaatgattatgacaacgcacagaagttcttaaatgagatagatgctgcatgcgtttatgtaaatgcttcaaccagattttctgatggaaatgaattcggctttggagctgagataggaatcagcacacagaagcttcacgcaaggggacctatggggcttgaagcactgacaagctataagtatattatttacggcagcggtcagatcagggaatagtcagctaaagtatcatagaattaatttgagaggaaacataatataacatgagctacgatatagatataacaaagacaccaccggcacatgagcctgagaggcagtattactacatggcaaaggcaaaggattttgttgaaaagaaatctaaagaaatcggccgtcctatgacttattttgtaaagacattcgggtgtcagatgaatgcccgcgactcagaaaagcttgtcggaatactcgagcagataggctacgtggaaggaactgatgagcactctgatttcattgtatacaacacctgtaccgtacgtgagaatgctaacaacaaggtgtacggcagacttgggtatctgcagaattacaagaaaaagaatcctctgatgaagattgctctctgcggctgcatgatgcaggagccggaggttgttgaaaatatcaaaaagcactataagtttgtagatatcgtattcggaacccacaatatattcaagtttgcagagattttgtgcaacaatatcgagtctggctcacaggtgattgacatatggaaggataccaatcagattgtcgaagatctgccggtgaagagaaagttctctttcaaatcaggtgtcaatatcatgtttggctgcaacaatttctgcagctactgtattgtgccatacgtaagaggtcgtgagagaagcagggagcctaaggatatcataagagagatagaaaagcttgttgcagacggagtgtgcgagataatgcttctcggacagaatgtcaactcatacggtaaaactcttgacaatcctataacctttgcagagcttcttcgcgaggtcaataagattgagggacttaagaggattcgttttatgacatctcatccaaaggatttatccgatgacctgattatggcaataaaggagtgcgacaaggtgtgcaagcatatgcatctgccgcttcagtcaggaagctcaagagtgcttaaggagatgaacaggcactatgacaaggaaaaatatctcgacgaggtaaagagacttcgtgagcagattcctgatattgcaatcacaactgatatcattgtgggcttcccgggagagactgaggaggatttccttgagacaatggatgttgtcaagcaggtcagatatgacagtgcttttacatttatttactcaaagagaacaggcacacgcgcagctaccatggagaatcaggtgccggatgatgtggttaaggacaggtttgacaggctcttaaaggaggttcagactatctcatcagaaaaggcaaaatgctatgagggcaaagtggtgccggtacttgcagaggaaatggacgaccagaaggacggctatgtgaccggacgtatggacaataattcaatcgtacattttccgggtaccgaggatatgattggaaatatctacaatgtgaagcttaatgagtgcagaggcttttactatatgggagagataaaagaggatgcgtaagcgttttggcagaaatgatataatcctgatatcggttattgtaattatctctgtcgctctgcttcttatatggaagcttgtatatttaaagggacaggatacggatagcgatgcatgtgtcgaggtgactatcgatggaagggcctatggcacatatccgctttcaaaggatgatacaattgagataaaaaacggcgatggcgatattactaacacccttgtcataaagggcggtgtggcagatatgacctctgccgactgtccggatcatctgtgtgtgaagcagaaggcgatatccaaggagggagagtcgattatctgtctgccgaataaggttgttgtgacggtaaaaagcgacacgaaatccgatatagattcgatatccaagtgatacccgaacatttttatagaaagaatgagataaatgaaaaccagaaagattgcatatcttggtatgcttatggcactggcactggtgctaagctatgttgagtcacttataccgtttgcggtaggcataccgggagtgaagcttggacttacaaatatagtgacagtaatcatgctttatatagcagcacccatggagacatttctgctatgtgtatttcgtgcggtgctttcaggatttatgtttggaaatgcgttcagcatcatatattcactggcaggctgtatactaagctttatcgttatgtacctgcttaagaaatcagataaattcagttcggtttcaataagcctggtcggtggagtgtgtcacaatataggacagataatagttgcggctatagttttgtcaacctacagcgtagtgtattatattccggtgcttcttgtggcaggatgcatcacgggacttgtgattggaatagtagcttcacaggtgcttttaagaatttctgacagctttcatgtatagttttaatgggctgtaatctacgtatatttaataacaaaaggagatgctgctgtttttatgcctgtgtgtcaggctacagtcgaaacagtaacaaatggattcaatgtatgcatatataaaaggagagcttgcagaaaaaaatatagacagcattgtagtggaggcagcaggtgtaggctatctcatttacataccgacgcagtattttgatatgctgcccgacgagggagaggatgtaaaaatttacacctacctatgtgtcagggaggatgccatgatactttacggttttttgagcaaggatgatcttgaaatctttaagctgctgattacggtcagcggaatcggaccaaagggcggccttgcgattttgtcaactctgcctgccgatgatttacgttttgcgattctatcgggcgactcaaaggctatatcaaaggcaccgggaataggtgcaaagacggctcagagagtgatacttgatttaaaggacaagctgtcgcttgaggatgcatttgaaaagaagcttgagaatcagacttccggtgctgctgtatccatgaacagcactgtgaaaaatgatgctgtcatggcgctcaatgcgcttggatactcatctactgagagtcttaaggcagtgtccaaggttgatatcacagaggatatggatgtagaggatgtgctgaagcttgcgctcaaaaatatgggctgattgataaaagctgtaagcttaaaacagaaacggggaacaaaacgtgaaaagagtaatttccacacaattgcaggaagaggacataaagatagagaaatccctgcgtcctatgtattttgatgactatatcggtcagcagaagataaaggacaatttaaaaatatatattgaagccgcaaaatcaaggggcgaagcgcttgatcatgtgctgttttacggaccaccggggcttggaaagacaacgcttgctggaatcattgcaaatgagatgggtacaaagataaaggtgacctccggtcctgcaataggtaagccgggagagatggcagccatactcaacggactttctgagggagatatactgtttgtcgatgagattcacagattaaaccgtcaggtggaggaggtgctctatcctgccatggaggattacgccattgatatcatgattggtaagggcgagtctgcaaagtcaatcagattcaacctgcccaaattcacccttgtaggtgcaacaacgagggcgggcatgctgtcagcgcctcttcgcgacaggtttggcgtggtaaatcacatggagttttacactgtcgatgagctaaagcatattatcgtcaattccgcaaaggtgcttggagttgagatagatgacaagggagcctacgagatggcgcgtcgttcaagaggtaccccaagacttgcaaacagactgctaaagcgtgtcagggattttgcgcaggtcaagtatgacggcaaaatcacctatgatgtggcaagctttgcactggatcttttggaagtggacaagtatggacttgatttaaacgacagaaatatacttctcaccatcattgacaagtttgcgggaggaccggtgggccttgatacgcttgcggcggcaataggtgaggatgccggaaccattgaggatgtttacgagccgtatctggtgaagaacggcttcataaaccgcacaccaaagggacgtgtggcgacagaccttgcctttgagcattttgagagaaaaagggcttaaagttgcaatttatatctataaggcatataataattaagtatttgatattgaaattgatattaatattaatatagctggtttgaataaatgtgaaaacggaggatgattaaatgtctgcaaaaacaaatgccgaggtggtaatagacggaaaggtttacacactgtcaggatatgagaatgaggaatacttacagaaggttgcggcatacatcaacaacaagattgcagagtttgatgatatggatgagtataagcatcttccgggcaatatgaagagcacacttattgagctcaatattgctgatgattatttcaaggcaaaggcacttgtcgaaaagctcgagggtgatatagagaataaggataaggaaatatacgatttaaagcatgatttaatttccaatcaggtaaagaccgagaatgctgaggcaagcatgaaggagcttgaggcacaaaacaaagagcttttactcaacaaggcgagacttgaggcaactcttgaggagtcacttcttgatggaaaaaagcctgttaaaaaatctgcacatgcttctaaaggggcaaatgacagtagcgataaatagcaataaaaggggaacagttatcgtacactgttccctattttattgcaggtttatatgatatcaaatgagcatctatatgaggaaatatatgagaaataaagattttgaactgcttgcaccggcaggcaaccttgagatatttaagggcgtgatagaaagcggcgccgatgctgtgtatgtgggcggaagcatgtttggagccagggcatatgccaataatttcacagaagaggagcttttagaggcaattgattttgcgcatttacgaggagtaaaggtgtatctgacggtcaatacgctgattaaaaacagtgagttttcaaagctctacgactacctgcttgtgtactacaaaagagggcttgatgcagtgatagtgcaggatattggagtggtgaaggctatccatgagtattttccgtcaatggagatacatacgagtacacagatgacggtgactggagcagacggagtgcgttttctttcacagtttggagtgacgcgtgtggtcatggcaagggaggtttctcttgccgagatgaagcgcatacatgaggaaacaggcatggagcttgaagcctttgtgcacggagcattgtgctattcgtattcgggacagtgccttttcagcagtattttaggtggtagaagcggaaacagaggccgctgtgcacagccgtgcagactgccgtataccgtggagggcaaaaaagatgaatacattttaagccttaaggatatgtgtggtataaaggctcttgacaagctgcatgatgcaggtgtttattcgctcaagattgagggacgcatgaagcagcttgagtatgcatgcggagtggtaaaatactacagaagctatattgacagcaaaaagcctgttagtgatgctgattatgacaggataaaggcacttggaaaccgctatggtttcacagacaggtattatttcgaccacaatggctctgatatggtgacttatgtgaagcctaatttcgtttcaaatgctgcagagccttcacctgaaaaaagaaagctttcgatagagggagagcttgttttaagagagggtgagcccggaagcctcactgtaaaaaggggtgatgtgacatacaaagcctcaatagaacctgtcagcgccgcacttaaggcaccgcttgataaaaaagccgctatcgacaggataaacaaaaccggtgatacagactttgagttttcacatattaaagctcaaatcggagaaaacgtctttgtgccaaacggagcactaaacaagctgcggcgtgatgcaatttcagggctttgtgataagctgttgaaaaagtattacaggaatgatgcacgatatgctgatatatcaagtatgtgtgagctccctgaacatgtcgtaaaaagcgatgcagcacatgaagatggagctgtaaatgcaaaggattacaccaccatatgctcgtgtatgacacgcgcgcagcttgatacacttattagctatgactgctttgatgtattttatctggattttgacatgtatgacaggaagactctgatacagcagtttgcagatgatgtgaaaagccttacaaagcgaaataaaaaagtgtatctcatgctgcctacgatattcagggcggattcatcggattattttgtatctatcgcaaaagagcttgatacggtaagcttcgagggctttgttgtgaaaaattacgaggagctttatctgacagaaaatctgtttacagggaaaaaagttattttagaccacaatatgtatacctttaatgatgtttcaaagagtgtattttttgagcacggagtaagtggtgacacagtgccgcttgaacttaattcaagggagattatgcatagaaacaatataggctcgcagatgatagtctatggatattatccgcttatgaccaccgccaactgtgtgcacaaaaacacaaagggctgtgataaaaagcaaaagcttatatatttaaaggacagatacaataaatcctttgcagtttgtaacaactgtaaggagtgctataatacaatatataattcactgcctaccatgctcacaaagaacataagtaagcttaaggaggcaggtataagaagttttagatacagctttacaatcgagactccaaagcagattaaggcggttatggatgataaggtagctgaatatacaaacggacattacaaaagaggagtagaataacatggtacatctgatagtacagctttccaagtatattatgataatactttttctcatatatacttttttatgctttcatttattcaagtatcccgacaagccgaaaaagcagaagcatatatataatctgcagagattttatatgtttctgattcatttagatggttttttggtgctctttgtcacgacaatggatacaaagataataggattttatatagcacagcttgtgctttttgaatcaatttatttgatttatcataagttttataagaatgcctcagagcttgtgctaaacaacatggtgatgatgctttgtataagcatgattattctaacgagaatttcgtttgacaaggcattaaggcagtttgtttttgtacttgccggaacgatatttgcgtttttaataccgcttatcatgcaaaaaggcacgatgtttcgaaaactgacatggacatatgccggtgtgggaatagttggactcttgtcggtgcttgtggtaggagtggcgagcaggggagcaaagctttctttgacatttggccctgtttcaattcagccgtctgagtttgtaaagatactttttgtattttttatagcatccatgctgtataaatcaactgatttaaagcagcttgccataacaagcggcgtatcggcagtgtttgtgctgatacttgttgcatcaaatgatctaggtggagcgcttttgtatttctttacatatctggtcatgatttatgttgcgacaaaaaagttttatatttttgccggaggactcgcgtttgtggggcttggaatgtacgcaggctatcatctgttttcacatgtgaagaacagaattgttgcatggcttgatcctctttctgtcatagacaaggccggctatcaggtgtgtcagtcgctctttgccataggtacaggcggactgtttggctttggactggggcagggactgccaaataagatacctattgtgtcaaaagactttatcatagcggctatctcagaggagatgggcggtatatttgctgtctgcctcattatggtttgtgtcagctgctttcttatgatatttaatctttccatgcagatgaaggatgcattttacaagtatgtggcgctgggacttggcagtgtgtatgcgcttcaggtgcttttaactgtcggcggctcaaccaagtttataccgatgaccggtgtgacgctgccgcttgtgagctacggtggcagctcgcttctatctacgatgattatttttggaatgatacagggcatgtatattatgcaggcagcccctgaaaaaaggagaaatatagatgacaagagacgaaaggaccatgagacaaaaaacagacaaaagcagacagctaaagagccgggggcgcagggaagtcaacagagaaggagaaaaccggcagcaggcggcaaaaacagcacgaagacacagaaatagagagtatgcggttgttacatattttttccttatagtttttgttggattgataggttatttcttatatttccagtttgtaaaaagcgacgaattcatcaacagtccatacaattcgctgcaggatcttttctctaagaacgtagtgaggggcgagatacagactaaggatggacatgtcatagcacggacaaaggtcagctcggatgcatctgagacaagggaataccctgacggcaggatgtttgcgcatgtggcaggctttgccgtaaacggtaaggccgggcttgaaaagcaggaaaatttctcattgcttcgctcacatgagtttttccttgaccagatagtaaatgatataagcggtaagaaaaataccggtgataatgtcgtaaccacactggattacgaagcacaggcggctgcatacaatgctcttggagattacgaaggggctgtcattgcaattgagccgaaaacaggaaagattgcagttatggtgtcaaagcctgattatgacccaaataccatcgcaagtgactgggagagcgtaaacggtgatggcagcacttctctttacaacagggcaacacagggacagtatgctccgggctcagtgtttaagatttttacagcacttgagtattataacgaaaatccgtctacatacaacgactatagttttgattgtgacggcagtattacaaaggacggctttacaatccactgtgccggcaataaatcacacggacaggaggacttaacaaagtcgtttgcaaagtcatgcaactcgtccttttccaatataggtcttttggtggataacaataagcttaataccttgtgtgacgatatgcttttcaacaagaatctgcctatagcctttgattcaaaaaagagtaaatttgcactggataacaatgcttcgtcagctctgaccatgcagaccacgataggtcagggaaacacgcttgtttcaccgcttcacatgtgcatgattgccggtgcaatctgcaatgatggaaatctgatgaggccatatctggtagaccatacggaaaatgcgagcggggcgcttgtggagcagaataaaccggcttcatacaagcagattatgtcaaaggatcaggcagcttttcttcagaatcttatggcagcagtggtatctgatggaacaggcgcaaagctaagagaccagagctatgaggcctttggaaagaccggaactgcccaggtatcagattctacagaccagaccaatgcctggtttgtgggctatggaaaaaaggatggctacaatgatctggcaatcgcagtagttgtggaggattcgggtgccggaagcacatatgcggtgccggtggcaaaaaaggtatttgataaatatttcaataaataggcttgttgcactttttttagaagtaggttatacttaagtgtaatgacagacgttatcgttcatatttcgcttgaactgacagatagcgtttaaaccacacttggaggaatggcaatgatagaagcaacgagctgtggcggtgtggtaatctttcgtggcaaaatattactcttatacaagaactacaggaacaggtacgaggggtgggtactgcccaagggaactgtggaatctgatgaagagtacaaggacactgcaatccgtgaagtgaaagaggagactggtgccagtgcaacgataatccaatacgtgggtaagagccactattcttttaccgtgccacatgatacagtggaaaaggatgtacactggtatcttatgatgggcgaaagttattatagtaaaccgcaaagagaagagtatttcatggattcagggttttacaagtatcacgaggcatatcatctgctcaagtttgcaaatgagaagcagatacttgagaaggcttacaatgagtacctggatttaaagaaaagtaacttatgggggacacacaagtattattagtattattaaaaagcagttttaaaaactgctttttgaggttttggaatgaaatggtatgaggatttatttgtaggagagtctgttaccggaaagataaagaaaatcaagtggaagatagagcataatgccggcatgcttcacacatacatcatcacgtttccgtcaaatgaggaaaatcttttggatatcattccgacaagagaattgctgcaaaagggatatcctaagaagaatctgcacataatcgcagtagcgggtaattatgatgaggcgcttttgctggtctgtgatattgttaatgagacatacgaaaatacaggtaaaacagatgtgaagagctatttaaagagcagacggaggaaatagatagatgatatttacgattttaaaggtcataggcatcatactccttgtagtgcttgctcttatacttacagcgctgctttgcgtactgtttgtgccggtcaagtacagggctgtcggaagctttgacaatacagacataagagcaaaagcacatgtgtcatggctttttcatttgtttgcactgcatatagagtatgcacaggagactgacggatatataaggcttgcttttgtgaagaagaagctgtttgataattatgaggctttggatgatgacgatatggatgaggcagctaaaactgaaacagaagataaagtcagtgaaaacaccgtggatgagcctcaaataccggcagatgagtcagaacacatcgcagatgaacagacagagaatgaaagcacagcacagactcataacgagcaaaggacagtaactgatgagaatcagcatataaaacaacaaactaagcccactcatcaaaaaacgtataaaaagccacacaaaaagtcacataaaaagcaatttaaagataagtcagaaaaaataaaaaactgtatctataagctaaaaagagaatacagtgatgagagaaataaagctgcttttttacatctgaaaaaagagctttttatcattcttaaaagaatatgcccaaggaggcttaagcttacaatggtttattcaaccggctcgccggatacaacaggcatttcattaggtattttagcatgttttcctgtcggctatacaaacagatggcggattacacccgatttcgagagtgaaaatccgtatgcaaagggcagctttgatataaaggggcatgtgatagtaataagtattttagcggcaacacttagaattttatttgataaaaactgccgcagattatataataggataagcagataggaggaagatattatggcagataatagtttcaataacacggtagagtcactttttaaggggatggacagctttatcactacaaagacggtggttggtgatgcgattcatataggggatacaatcatacttccgcttgtggatgtgtcgtttggagtggcagcaggagcattttcggcagaaaagaaaaataacggagccggtggtatgggcggaaagattcagcctagtgcagtgctcgttatccagaatggacagacaaagcttgtcaatgtaaagaatcaggacggcatgacaaagatacttgatatggtgccggacattgtaagccgtttctcaaagggaaaaaatgatgaccttaatctcgacgatgtaaaggtagacgaggcagaggacgataagcaggattaatttcatatatgaaagcaaataaaaaggacatccaaacggatgtcctttaaaattcaaaagattcaaaaataaagactaagctctctcaactttgccagatcttaaacatgaagtacatacatataacttctgtggaactccattgaccttgcaagaaaccttcttaatgtttgacttccaaacatgatttgatcttctatgagaatggctgacattatttccataatgaacacctttttcacaaattgcacattttgccatgatattgcacctccttgcatttcactaagcttaccatactcttaagctcacaacaaatgtattctatcagattaaaataaagaatgcaaggataaaatataaaaatatttgctttttgtgaaaaaaaaggtataataacattagctacgtcacaatatgatggaggtatatattatgaagggacagatggatacccaatatggacaaattttaattgatacagatgttattgcaacctatgcaggctctgtagctgtagagtgctttggaatagtaggcatggcagcggtcaacatgaaggatggtcttgtaaagcttttaaagagagattacctgaaccatggaataaatgtaaaggtagatgagaacaacgaaattaccattgattttcatgtaatagtagcgtatggtatttcaatcggcactgtttcggacaatcttatcgagacggttaagtacaaggttgagtcatttacaggaatgaaaattgcaaagatcaatatttacgttgagggcgtaagggtaattgattaaggaggactacaaaaagtggagatcacaagcattaattcaaagctccttgcaaggatgtttcttgcgggagccaagaatcttgattcaaagaaagactggataaatgagctgaatgtattcccggtaccggatggtgataccggaacaaatatgacaatgacaatcatgtctgcggccaaggaggtcagctcgctcacaaatcctaccatggcagagcttgcaaaggctatttcatcaggctctttaagaggcgccagaggaaactcgggtgttatcttatcacagcttttcagaggcttctgcaaggttataaaggaatacgatgaaatagatgtcactattctttgtgaagcatgccagaaggcggttgagacagcttacaaggcggttatgaagcctaaggagggaactatcctcacagtggcaaagggcgcagcagaaaaggctcttgagctgtcagacgaaacagaggatgttgtcacatttgttgaagaggttataaagcaggctgagtatgtgcttgaccagacaccggagatgcttcctgtattaaagcaggcaggtgttgtggattcgggcggacagggacttgttcaggtattaaagggagcatatgatgcccttatcggcaaggagattgactatacaatcgagggtgcaccaacaggagcagctcctgcaaagatttcggctgagacagaggcagagattaagtttggttactgcacagagtttattattgtactcaatgcgccaatgtcagacaatgaggagcacgcatacaaggcattcctcgagtcaatcggtgactctatagtcgttgtagctgacgatgagatcgtaaagactcacgtacatacaaacgaccctggacttgcactgcagaaggcacttaccttcggctcactcagcaagataaagatcgacaatatgcgtgaggagcatcaggaaaagctcatcaaggattcacagaagcttgcagcacagcagaaggctgaggaagaggcttatgaagctgctcaggctgatgaaatgacaaataacatgcctgcaaaggaaatgggctttgtatctgtttcaatcggagaaggcatgaatgaagtgtttagaggccttggagtggactatctcatagagggtggtcagaccatgaaccctagcacagaggatatgctcaacgctatcgagcatgtaaatgctaagacagtatttatcctgccaaacaacaagaatatcatcatggctgcaaaccaggcagtagaccttgttgaggataaacagattattgttatccctacaaagactatcccacagggtatcacagcgcttgtaaattatatccctgaccacagtgccgaggagaataaagagcagatgatggctgagatagaaaatgtcaagacaggacaggtgacatatgcagtccgcgatactgagattgacggaaaaaccatcaagcagaacgacttcatgggaatcggagacaagagcatcctttctgttggaacagacttaagggctaccacacttgagatggtagatgccatggtagatgaggattcagcgattgtcagcatttatttcggaagtgattctgatgaggactcagctaatgagcttgcagcagcaatcgaagagaaatatcctgatgtagaggttgaggtcaacgatggcggacagccaatctactattatgttatttctgtagagtaaagccttttaaagaatataaatgacatttattatatttaggagcaaatatggatatagcttcaccgattaccgcggttaagggaatcggggaaaaaacacaaaaagcatttgctaaaatgggagtatacaccgttggtgatatactccttcattttccccgggattatgtaaagtttccggaaataacggatattgatgaactgaataatgtaaacgtaagcagcacctatgccatccatgctgtgattaaaaaggcacctgtagtgaaaaatacagcgagaatgcagattacattgcaggatatcggctcgcccgggcatatgatacagctggtatggtaccgtatgccataccttaaggcacagcttgtgcaggggagacatcttatattttacggacatattaagccaaagggaggccgatatgtcatggagcagcctgtggtgtatgaggtgcaaaagtacgaggctatacgcgatacactgcagccagtgtattccgtgacaagcggtgtgacaaacaatctgatagtgaagacgataaaggagactctgtcacatgatacactgctgtcagattatctgcctaaggatataaggcacagatacggcttttgcgagtataattatgccatgaagcagatacatttccctgatgactttgacgctcttgtggaggcaagaagacggcttgtttttgatgagttttttctctttatcatgggcatgcggtatcagaataaaaagcagcagaaggacaaaaatgagtttgagtttacggatgatgcttttatagacggactgattgagaagcttccgtatgagctgacaggcgcgcagaagaagacaatagatgagataaagcaggatattaaaagcccttatgtgatgcagagacttattcagggcgatgtgggctcaggaaagacaattgttgcttttcttcttatggcgtgggcgtcaaaatgtggctatcagtctgccataatggctccgacggaggttcttgcaaaccagcattatgagacgttttgctcactggttagtcagtttggacttgacagtcctgttgtgcttcttaccggctccatgacggcaaagcagaaaagagaagcctatgcgcgccttgaaaacgagaaaaatgcgcttattataggcactcatgcactcatacaggagaaagcggatttttccaatctgtcgcttgttatcacagatgagcagcacagatttggagtgaagcagagagagagcttctcggataagggaagaaagccacatatacttgtgatgagtgccactccgataccgcgtacgttagcaataatcatatacggtgatatggatatctctgtcataaatgaggtgccggcaaagagacttccgatcaagaactgtgtggttggcacggcattcaggccaaaggcctacagctttattgctgagcaggtgagagcaggtcatcaggcgtatgttatttgccctcttgtggaggaaaccgaaaactcggaaggtgaaaatgtcacagactatgcaaatgtgcttaaagcggcactgccaaaggatatcacggtagatgtgcttaacggcaggatgaagagcaaggcaaaggatgaggtgatgcagcgctttgcaaataatgagtcgcaggtgcttgtgtccacaacagtcgtggaggttggtgtaaatgtgcccaatgcaactgtaatgatgatagagaatgcagacaggtttggacttgcacagcttcatcagctaagaggccgtgtaggcaggggggatgcacagtcgtattgcattttcatcaattcgtcaaattcaaagaaatcaaaaaaacgtctggagatactaaataaatcaaatgatggcttttttatagcaagtgaggatttaaagctcagaggtcccggggatttctttggaatcaggcagagtggagaccttgcgtttgcacttgcggatgtgtatcaggacagcgatgtgctaaaggaagcatctgagatggtggatgaggtgcttgaagcagacccggcgctttgtacacaggaaaacagaatactgaaaaagaaaatggatgaatttgcaaaagaacaattaaagaggatgaatctatgatgagcttaaatggctaaaataaaagctgatatagcatgcaggactatgcatgtgtatatcagctttttactttaagcgttttggaatggttatgaaataagtataatctgcttactcaatctgtctgatatcggatatatccgggtgaatcgtgagagaatagtttgtgtaatacacgacaaagccggctgcggcaccgtttggctttttgacatttttcttttgcagatagtctatctctaccttgtcggcatttttgccctttgagtagtagcctgcgagcttgccggcctcctcgaaggtgctgtccggcagctctttgttttcagcttttacaatgacatgtgagccgggcatgcccttggcatggaaccaccagtcgtttccggttgccagcttgaaggtgagctcatcgttctggtagttgtttttgccaacgtacatatcaaagccgtctgatgagatatagtggaagggtttgctctttaccttctgtttctttgaaccctttccttttttgataaaaccgtattctatcagctcatcctttatctggacgaggtcgtcagcacttaaagcgatatccagtgaattctgaattgattcgagatggtctatctgaccttttgtttcaagaatcagttcattcaatgcttcggcagtacgtttcatctttccgtatttgtcaaagtatttctgcgcgttctcggcaggagtttttgtgttgtcgatagggattttgatgattttgttgtcatcataatagtttgcagcttcaagaaacttgtcgtccggtgtaagtccgtagccgaatgcgttgataagctcgccgtacaccttgtacttttcgcgtttttcggagtccttaagctgcttcatctgcagggaatatttcttctggtttcgctccaggagggtatttacgtgttttctcaggtcggctgacttctggcgtatacgtgtataggtgtttctctcagagtagtaaagctctaaaacctctgatatagattcatattttgtgaccgttaaatcgctatactgagtcagctctattgaagaaaattcctttggttcattgccgtcacgcacgatattcggcgtaaaacgattattttttatgtcctccatcatccatgtgaagttgcttcccaggtgcaaaagctcatcgtgtgagtaggcagctacaggggagtccgcgtcaaggcctgccctgtgagccagctcatttgccacaagtgggctgatgccggaaaaggatgagtagatagcctttgaaacagtaagcggctttgctgatataatatccacaaactgtttcgaatctatagtcagaggattatatttatcctcctgtgtcgcggggatggtgtaggctctgcccggaagcacctctcgcacagagcttacggatgcgggaatacgcttggcactgtctattatcgtaccatcggagtcggtaaagatgatgtttgaatatttgcccatcagctcgataataagcaccttgtggcatagatcgcccatctcgtttaagtgctcgatttcaaagtttatgatacgctccatgcccggctggtaaatctttgtgatgcgtccgtttgctatatgctttcttaaaaccatgcaaaatgtaggggcagtgagggggcttaccttatttgtgggtgtcaggtagatgaatggaagagatgcacttgcagacatcgaaagcctgaacgagccgtttggtccctttagggtaagaagcagctcatctgcctcaggttctgcgattttactgatttttgagtttagtatcgtactgtttagctctgcaactatatttgaaatgactattccgtctaaagccatgatgttcctccttatttcctgtaaatattctaagttgctgaatatttataatcatgaatatttatattataatatatttgacgaaaatctcaaggagttatataataaactcatctatgcatatgcgaaaggaaaaattatgattaaaagtatgaccggctttggcagatacgagtacgcagatgcaagccgtaagattacagttgaggtaaaatctgtaaatcacagatatctggatgtcaatatcaagatgcctaaaaagctcaatttcttcgagagtgcaataagaactctgcttaaggagtacatagagcgtggcaaggtcgatatttatatcacatatgaggattttacagaaaataatctctcattgcagtataataaggctctcgcgggagaatatcttaagtatctgaatcagatggcggaggaattcggactggagaatgatataagagtgagcacgctgtcgagatatccggaggtacttgcgatggaggagcagcctgtagatgaggatgagctgtggagcagtcttgagaaggctcttcgcggtgcatttgagccatttgttgaaagtcgcgtgcgcgagggagaaaatcttaaaaaagacctttgcgaaaagctcgataatatggtatcatatgttgatttcattgaggagcgttcgccacagattattgttgaataccgtgcgcgtcttgaggaaaagctaagagagctgcttgcagacaatcagcttgatgattcaagaatagcccaggaggtcactatttttgcggacaagatctgtgtggatgaggagacagtcaggctcaaaagccatatcctttccatgaaggattcgctaaatgccggtggcagtgtgggaagaaagcttgatttcctcgcacaggagatgaaccgtgaggcgaataccatcctttcaaagtccaatgatcttaagatttctgacacaggcatcagtcttaaaactgatatagaaaaggtcagggaacagattcaaaatattgagtaattttaggagatagtgatgagtaacacaggaaaattagttgttttttcaggcttttcgggttccggaaagggtactatcatgaaggagcttatggcaaagcatggtgatgattatgcactgagcgtatcagccacgaccagaggtccaaggccgggtgaggagcatggcagagagtatttttttatctcagaggaagaatttgaacagatgataaaggcagatggactgcttgagtatgccaagtatgtagatcattactatggcacaccaaagtcatatgtcaatgagcagcttagcgccggaaagaatgtgattcttgagatagaaatccagggagctttaaagataaagaagcagtttcctgatacggtgcttatgtttgtgtcagcgccgagtgcagatgagcttaaggaccggcttgtaggaagaggcacagagacaaaagaggtctgtgcacagagactttcgagagcatatgaggagtctttgggcatagagaaatatgattatttagtggtaaatgataagcttgacgattgtgtagagcttgtgaatgacatcatccacagttctgacgacataaaaaagaatcaggattatctggtatcatcaaatatagattttataaataaaatgagaaaagagcttttaagcttttcgaaaggagataaataatatgatacatccatcgtatgtagagttaatgaaggtagtaaacaacaatgtagagataggtgaagagccggtagtaaacagccgttattctatcgttattgctgcagcaaagcgtgcacgccagattattgatggtgcagaaccacttatcgcacgccctaagtgcaataagccattatctattgctgtagaggagctgtacacgggagctgtcagaatcgtctcagatgatgaggatttaaacgaaggcgaagaggcttaatctaggaggggaaaggctgttttgtctttccctttaattgtaaatacttacatttgagaggtactatgaaattattatttatttcgcttggatgcgataaaaaccttgtggattcagagtatatgataggcatgcttgcaaatgacggcattgagatgaccgatgatgagacgcaggctgatatcattatcgtaaacagctgctgtttcataggtgatgcaaaggaggagagtatcaatacaattctcgagatggctcagtataaggagacaggcaaatgcaaatcacttattgtgacaggctgtctggcacaaagatacaaggatgagatttttaaggaaatcccagaggttgatgccatacttggcaccaattcatatgatactatagttgaagctgtccatgagacacttgaaaaacacagatacagcaatctgcacaccttagagggacttcccagcataaagacaaagcgtattgtcaccacaggagggcatttcgcttaccttaagatagcagaggggtgcaataaaaactgtacctactgtgtcattccatctgtcagaggccgttacagaagcgtgccgaaggaggatttgattgagcaggcgaagagccttgtggagcagggggcaaaggagcttatacttgttgcccaggagaccacactttacggagtggatttgtatggtgagaagtcacttcataagcttttggatgagctcaacaagataagcgggctgttctggataaggattatgtactgctatcctgaggagatatacgatgagcttatagagtccatgataaaggatgagaaggtatgccattatctggatatgccaatccagcactgcaatgacgatattttaaggcgcatgggcagaaaaacaacaaaggctgagcttatggagcgtatcagaatgctgcgtgagagaatacctgatatcacattaaggaccacacttatatgtggcttcccgggtgagacacaggataatcacgaggagcttatgcagtttgtaaatgatatggagtttgaccgtctgggagcctttacgtattccccggaggagggcacaaaggcagctgcaatgcctgatcagatagatgaggatataaaggctgactggcaggctgatgtcatggagcttgaggaagaggtcatttttgataaaaatgagacactaaagggtaaagaattatatgttttcatagagggcaaggtggctgatgaaaatgcttatatcggccgtacatacagagatgcaccgaatgttgacggatatatattcatcaacactgatgagacacttatgaccggcgatatatgcaaggttatggtgaccggtgcgtatgaatatgatttgataggagaacttgtaaaatgaatttaccaaacaaacttacaatcttaagagtgatacttattccgttttttgtatttttccttatttcaccgttttttgacggatacggaaattatatagcacttgcgatatttatcattgcaagtctgaccgatatggctgacggaaaaattgcaagaaaatacaatcttgttaccaatttcggcaaatttatggatccgcttgcagacaagctgcttgtgtgctctgcgatgatatgccttgttgatttaaagcttatccctgtatgggttgtgcttattatcattgcaagagagtttatcataagcggcttcagactcgttgcatcagacaatggaattgtcattgcagcaagctactggggaaagtttaagacaaccttccagatgcttatggttattgttattatttttaatatcaatctgcagcttggctggttaaatatccttggaacaatcctcatttatgtggcacttgtactcacagttgtttcgcttattgactatatcgcaaagaataaggacgtcttaaaggaccagaaatagactataacagggagaaaagtatgagaataatagcaggaacggcgagaagcctccctctaaagactatcgagggaaaagatacaagaccgactactgacaagacgaaggagactctttttaatgtcatgcagtttgatgttcccggagcatattttttagatctgtttgccggaagcggacagataggacttgaagcgttaagccgcggtgcagcctatgctgtatttgtggagaattcaagaaaagccgcttcatgcatcgaggacaatatccattttacaaagtttgataaggtctcaaggcttatgatgacggatgctgtcacggcagtacgtactcttgagggcaaatacaaatttgatatcgtgtttatggacccgccatacaataaggagcttgaaaaggaagtgcttattacactttcggacagcgatatattaaaggatgatacacttatcgtggttgaggcttcaaacgatactgattttgattatctcacagagcttggctatgagatagtcaaagaaaaaatttataagacaaacaagcatgttttcataaagcgtgcataggagatacaatatgaaggtaggaatttatccgggaagctttgatccggtgacatttggacacctggatataatagagcgttcagccaaaatagttgacgagctggttgtcggagtactcaataatagtgcaaaaaactcgttgttttctttggaagaacgtgttagtatgataaaggaaatgacagcacatataccaaacgttagggtagggtgcttcgaaggacttttagttgattatatgaagaaaatcaatgcaacaatcataataagaggattgcgtgcagtgacagattttgagtatgagctgcagattgcacaggctaacggagtgcagaatccggaaatagagacggtttttctcacttctagcctcaattattcatatttaagctctacaattgtcaaggaatttgcatcatacggaggagatatatcaaagttcgtacctgaacagttcattgatagaatttatgccaaatacaatattaccaggtaaggagacagtatttatgagcagtaaaatggaacagattattgaagaaatcgaagactatattgatggctgcaagccgtcacctatttcaagaaacaagattcttgtcaatcgtgaacagttagaggagcttctttcagagcttcgtacaaagacccctgaggaggtcaagagatatcagaagattatcagtaataaggaggctatccttgctgatgcacaggcgaaggctgatcagataatcgcgcaggctcagattcagacaaatgagcttgtcagcgagcatcagattatgcagcaggcatatgctcaggcgaatgaggtagtgcagattgcaacaaagcaggcacaggagatacttgacagtgccacaaacgaagcaaataatctcagaatgagtgccatggcatatacggacagccagctcaagagcattgaggatatcttaacaggctctattgagacttcaaaggccagatatgacagccttataagttcactgcagcagtttgaggatgttgttgcagcaaacagagcagagcttttcccaccggaagagaatggcgatgaagctgcaggagcggagtcgtctgacaatgaggcagcttcagatacatctgatgatgacatagaaatcaccaatatttccgattcagatgaggatgcgaaataggataatacataacaggcatgagagtatgctcatggctgccttaagcagtatgtatctgtaaagcctaaagcctgtatcccggaatattgatttggtctggaccatgcatgatacaccgccaaatgacagaagtgcaatgcacagcactattgacagggtgcgtggaatgcatagaccgcagactatgccgataccgtttgtggtttcaaaaaaggcacctattatgtctgccgacagtggcatgctgcagtcagctttttgggcaatggtctgtgggatacgtgagactatagagaacaatacaatatatccacagagttttataagggtttcaaaccctttcattattccggcatcaacgatttgcatgttaagcttaaatccttgagccgggattttttgttttaagcttctgtttttgtttatcgaaagcatagctatcattcctatagcagatggcagatacagtgacacaagataaatgctgtagtggctgcatatgttaagttgctcggacagtgcataggtaatgataaatggaaggctgaaatggtttgccagtgcactcagtatttccctgtgatttttatctatgtatcctttggaacaaaaatctgctgtgagctttgctcctatcggaaatccaaatattatgcctattatgtatgtaaaaagcatgatatgcttttggggaatgttttgcagcacatttgttgagataatcaggttagataaaatcgtaaatataaacagaagcggaaatatctggttgaaccatagcattatgccagctttagcgcacgtacttacctgtgccggaaacaatatgtaataaatacaaaatagcagtataaaagcgataaacagtaattttttaagtttgtttttactcatgtgacagtatatgtggagagaaatatcaatatgattcgattagataaatttttatcagagatggggcttggcacacgctctgaggtaaaaaagcttataaagaccggacagatagccataaatggcacggtggccgcaaagcctgagacaaaggtagatactgatgccgacgaggtatcagttaacggcagaatagttaagtatcaaaggtatgagtattacctgtttaataagccctcaggctgtgtttctgcgaccagtgacaatgtgcatgatacagtcatggactatatcacggatgctgtgcatgatgatctgtttcctgtcggaaggcttgatatagacacggaggggcttttacttatcacaaatgatggagcactttcgcacgagctcttaagtccttcaaagcacgtggcaaagacttactacgcacgtattgatggtgaggtgactttggatgatatcatcaggtttaaagagggcattgatataggcgaggaaagacctacaaagcctgcggagcttgttattaaaaaaagtggcagcgtatccgagattgagcttacaataacagaaggaaagttccatcaggtcaagcggatgtttgaggcgcttggaaagagggtaatctacttaaagagaatatccatgggaccgcttaagctgcctgatgaccttaaaacagggacttacagagctttgacacaggctgaaacggatatgcttatgcagataaaatccggcaaataaaataatttttaattatgaggtatgatatgagtaatggttttttaccaatttcaaaacaggatatgatagatgagggcattgagcagcttgattttgtgtatgtctgcggtgatgcatatgtggatcatccgtcctttggacatgcaataattgcaaggctgctgcaggcacatggctatacggtcggcatcatttcacagcccgactggaaggatgatgagtctatatccatactcggagtgccgcgtcttggttttttggtttcggcaggtaatatggactccatggtaaaccattattcggtttcaaagaaaagaagagcaaaggattcatttacaccgggtggcgtgatgggaaagagacctgattatgcgaccgttgtgtactgtaacctgatacgccatacttataaaaaaatccctatcataataggcggcatcgaggcgagccttaggcgcatggcacattatgattactggtcaaataaagtcaagcgctcaattcttttagattccggtgcggatctcatttcatatggcatgggagaaagaagcatcatcgagatagcggatgcgcttgccagtggtatggatgtaaaggatatcacgtttatagatggtaccgtgttcaagacaaaggacagggatatcatatatgatgcgattgagcttcctgactatgacgttataaaagaggacaagagggagtttgcaagaagcttttacatacagtactgcaatactgatcctttctgcgcaaagaggctcatagagccatatgacaactctacgcttgtggtgcagaatccaccgcaaaagccactgtcgcaggaggagatggatgaggtctatgcactcccttatatgaggacttatcacccaagctacgaggaggcaggcggagtgcctgctataagcgaggtgaagttttctcttatcagcaacagaggctgctttggaggatgtaacttctgtgcactgaccttccatcagggcaggataatccagacaagaagtcatgagtcaatcatagaagaggcaaagcttatcacgcaggataaggactttaagggctatatccatgatgttggaggccctacagccaatttcaggcagccggcatgtaaaaagcagctcacaaggggagcgtgccctacaaagcagtgcctgtttcctaagccgtgtaataacctgattgttgaccacagcgactatatacagctgcttagagagcttcgtgcactgccaaaggtgaaaaaagtgtttatccgctcaggtatcaggtttgattatctgatgtatgataaagataagacgtttcttcgtgagctgtgtgagtatcatgtcagcggacagctcaaggtagctccggagcatatctccaatgctgttttgagcaggcttggaaagccgagtgtagaggtgtacaacagctttgtgaaggcatacaaggatatgaacaaaaagataggcaaggagcagtatcttgtgccttatctcatgtcttcacacccgggctcaacacttaaagaggcgatagagcttgcagagtatctgcgagatcttggatatatgccggagcaggtgcaggatttctatccgacaccgtctaccatctctacatgcatgtactatacaggacttgacccggcaacacttaagccggtgtatgtcacaactaatccacatgagaaggctatgcagagggcgctcatccagtaccgcaatccaaagaactatgatctcgtgcacgaggcacttgtgaaggccggcagggaggacttaatcggatttgacaaaaagtgcctgataaagcctaggaaaatgcataccgatggcggctgggacaaaaaaacttctaagtctgataaaaattcaaacagcagctatggcagtggcaagaatgcaggtgtaaggaaaaacttgaaaaatgcaacagagcgagggaaaaacgcaagcggaagtaacaccgcaggcacagcgcacaaaaagaaaacaatcagaaacgtccacaagaagaaaagatagatatacaagataaaggctatgaaagaatttaaagcaggtaaaaacgaggcaggccagaggcttgacaaataccttaaaaagatacttccaaacgcatccatgggctttatttacaagatgctcaggaagaagaacataaaactgaatgataagaaagcgtcaggaacagaaattgtgtcagttgacgacaaaatcaagatttttctgtcagatgatacatttgctaagttttccgtcaatgaggacagtctgatgaaggattttaaggcactcggtgcactaaagcctgacggacttggtgtggtatacgaggatgatgacatactggctgcaaacaagcctgtcaatatgctgtcgcagaaatcaaaggagactgatatttctgcaaacgaaaggcttattggatacctgataaaagagggaaagcttgattttgacacatataagagctttaagccatcggtgtgcaaccgcctggacagaaatacatcggggctgattctgatgggtaaatcgcttcatggactgcagtacctgtcacaggtgcttaaggacagaaccgcagaaaagtattatatggcgcttgttgcaggagaggttgatgagcctatgaccatagagggctttctgacaaaggatgaggctgtaaataaggtgcagataaccaaggaacccataagtgatgaatcactgccaataaagactgcctacaggcctcttaagacaattgatatgagtgcttcgtgccataaagcaactcttcttgaggtgcatctgattaccggaagaagccatcagatcagggcacatctgtcatcgattggtcatccgatcataggtgatataaagtatggtgatagaaggattaatgctttttacaaagaaaattatcatgtgaccagccagcttttgcatgcgcaccatgtgattttgcctgatggcagatatatagaggcggctttgcctgacatatggagcagggtggggctttaaacccgttattatttactttacgtcgcatagcttatagtattaaggaagatagaaacgatatggcaacctggaattcaagaggcttaagaggctcgaccttagaggacatgataaacaagacaaatgaaaaatacagggagaacggcctggcgctcatacaaaagattcccactccgattacacctataaagatggagccggaaaccagacacattacactggcttatttcgagcagaagagtacggttgactatattggcgctgtacagggaatcccggtatgctttgatgcaaaggaatgtaataccgacacgtttccccttgccaatatacatgagcatcaggtagagtttatgagatgctttgaaaaacaggatggtgttgcatttatccttatatcgtacacacacaggaacgaatactattatctcacgtttaaaaagctgacagaattctgggatagagctgcagaaggcggaagaaagagctttcgctatgaggagcttgagccggcatttttccttccggaggtgcccggaatacttgtgccgtatctgaacgcacttcagcttgacttaaattgcagggcttgacagtattactatcgtatggtagcatattaccacgataacactttactacatgaaagcgagattttacagattatggaaaatcaattattacacactccggacggagtaagagacatatataacggagaatgcaaaaaaaagctgtatttgcaggataagctacaccgtacacttttaaaatacggatatcatgatatcatgacacctacgtttgagttttttaatatttttggaagcgatgtcggaacaaccccttcaaaggatttatacaagttttttgacaaggagggcaatacgcttgtccttcgtcctgatttcacaccttctattgcaagaagtgcggctaagtactatatagaggacgatatgcctgtcaagctgtgttatcttggcaatacttttatcaattcatcggattatcagggcaggctcaaggaaagcacacagtgcggtgcagagctgataggtgatggctctatctctgcagatgccgagatactttcgatgacagttgagtcgatgcttgagagcggacttaagaatttccagatttcagtcggacattcgcagttcttttacggtctcacaaaggcagcagggctgtcaggcgagcaggaggaagacctaagagagctcatagcaaataaaaatttcttcggtgtggaggagtttgttgacagtctttcaatgaacgacaagctaaggaagctgtttggactattagataatttcgatttacaggatgagcagcttatggaggctttaaagcttgcgaagggctatgatgagatattatcatctattgatactctgcttaagcttagagaatatttaaaggcatacggcatcgagaaatatatttcgtatgagcttggacttatcagtgactacacatattacacaggtattattttccagggctacacatatggtacaggagagcctattgtaaagggaggccgttatgacaagctgctttcacactttggaaaggacgctgctgcaatcggctttgcaattgttgtggatcagctcatggcagcattaagccgtcaggatattgatgtgcctgtcattgagaattcatcacttatagtatttgaggaggctgcataccatgcggcaatcaagcgctctatggagcttcgaagagatggagtaaatacacagatggtgcttaaggacaaaaataaaacgaaagaggactatgcttcatatgcggtagacaaccgtataaacagagtagagtttatagaggaataaaagatgagtgatgacagatatttaacctttgccctgggaaagggcagacttgcaaagaagaccttgcagctttttgagcagataggcatcacatgtgaggagatgaaggatccggataccagaaagctgattttcgtaaatgaggagcttaagcttagatttttcctggcaaagggacctgatgtgcctacatacgtggagtatggcgctgccgatatcggtgtggtaggaaaggataccatcctcgaggagggcagaaatatatacgaggtgcttgatttaggttttggaaaatgccgcatgtgcatatgcggaccggagaccgcaagggagcttttgcagcatcacgagcagataagagttgccaccaagtatcctcatatcgcaaaggattatttctacaataaaaagcatcagacggtagagattataaagctaaacggctcaatagagcttgctccgattgttggactttcagaggtgatttgtgatatagtagagactggaactacacttaaggagaacggacttaccgtgcttgaggaggtctgtccgctgtctgcgagggttgtggtaaaccaggtcagcatgaagatggacaatgagcgtatcacaaagctcataagtgatttgaagactgttatcaaatagcgtataatttatatcaatacatgattttagacggaggctgtaatgagaactttaaaacttacaaaggattcacagaagaacatattggagagcctgcttaagagaagccctaacaactatacagagtatgagagcacggtaaatgagattataaacaatgtaaaggaaaaccgtgacaaggctgtttttgaatacacaaagaaatttgataaagcggatgtggatgcatcaaatatccgtgtcacagaggaagaaataaaggaagcatatgagctggttgatgagaagcttcttgccgttataaaaaaggctcttataaatatcagaaaatatcacgagaagcagctgcagaactcatggtttacaacagaggacggcatcattttaggacagaaggtcacacctatagcaaaggcaggagtatatgtgccgggcggcaaggctgtctatccttcatccgtactgatgaacgtgcttcctgcaaaggtagcaggcgttgaaaagattgttatgtgtacaccatgtggagctgacggcaaggtatatccttccacacttgtagctgcaaacgaagccggagtagatgaaatctacaaggtaggcggtgcacaggctatcgctgcaatggcatttggtacagagagtgtgccaaaggtagacaagattgttggaccgggaaatatctttgttgcccttgccaaaaaggctgtgtttggatatgtcagcattgattcaatcgcaggacctagcgagattctggtgcttgcagatgagactgcaaatccacgctatgtggcagcagatttactttcacaggctgagcatgatgagatggcatcagctatcttgatcacaacaagtgaggagcttgcaaagaaagtatcagaggaagttgataagtttgttgaggtcctctcaagaaaagaaatcattgagaaatctcttgaaaactacggatatatacttgttgcagaggatatggatgaggcaattgatgcagtaaacgatatcgcttcagagcatatggagattgtcacaagagatcctttctcagtcatgacaaaaatcaaaaatgcgggagcaatctttatcggagagtactcatcagagcctttgggagactattttgcaggaccaaaccatgttctgcctacaaacggaacagcaaaattcttctcagccttatctgtagatgactttatcaaaaagtcaagcatcatctcatattcaagagaagcacttgagagaatacatacagatattgaacagtttgcagagtgtgagaagcttacggcacatgcaaattcaatcaaggttagatttgaggattagtcaaaggagtaagaaatggcagatagatgcgctaagcttagcagaaaaacaaaagagactgatatttcggtcggtttaaatatagacggaaccggaaaatcaaatatagacacaggcataggcttctttaaccatatgctggagggcttttcaaagcatggtttttttgacctcgatatgacatgcgttggtgacttaaatgtggactgtcatcatactatagaggactgcggcatagtgcttggcaatgccatagcacaggctgtcggagacaagaaggggataaagagatttggaagctttattttaccgatggatgaggtgctggtgctttgtgccattgacttatcaggcagaccgtacctgcagtttgacggtgagtttacctgcgagagagtcggagatatggatacagagatggtgagagagtttttctatgccgtttcttactctgctgcgatgaacctgcatataaaggttttgacaccgggaaataatcatcatatgatagaagctatgtttaaggcatttgccaaggcgcttgacgatgcctgcacctatgatagcagaataaaggacgtgatgtccacgaaaggaagtttgtaatttgactggttttaagaacatcgttgctacactgtatttaaagaacggccaggctgtgaaatcagcgtcagatatgacagtaatgggcgacgtctacaatctgtgtcagctctacaatgacagtggcatagacaagattattatttttgatctttcaactgatgatgatgagcatgagaaaaacatacatacgatagaaaatataaacagaaatatcgatataaaggtgtgcgcaggaggcaatatcaaccgcatagaggacgtgaaaaagctgctgtatgcaggctgtttacaggtcatcttcaatgccacaaaggattcaagccttgagcttgcaaatgtggcaagcgagaagtttggcaaggataaaattcttttgtcaatcagcaatgtagactatatttttaagcatcaggaggagatagaggatacatttcatgagcttttggtgttgaatatagatataatagatgcgcttgagaatctcacatccacaccttatgtggtctatatgccgcagtttgacatggataaaataattgatgtcatgaagcgtgaaacactaagaggcattgcaggagagtttatcaatgatcctgaaaatgatatcatggcgttaaagacaaagctttctgacggaggaatacttgttgacaattttactccagacttaaagtggtctgatttaaagctcaactctgacggcatggtgcctgtcatagtgcaggattaccgcaatgagcaggtgctcatgcttgcctatatgaatgaggaggccttcaatgtcacgataaacagcggacgcatgacctactggagcagaagccgcaatgagctttggaccaaaggacttacatcaggacatttacagtacgtaaagtctttgacagcggactgtgattatgatactatccttgcgaaggtttcgcaggtgggagctgcatgccacacaggtaacaggacctgctttttcaataatatcgtgaaaaaggagtatgtggagaagaatccacttacagtgcttgaatcagtctatgcggtgatagttgaccgtatgaagaatccaaaggaggactcgtacaccaatgctgtcatggaaaagggcatagatgagatattaaaaaagcttggacacgagtgcactgagattattctggcagccaaaaatccggacagtgatgatttgaagtttgagatatcggactttatgtaccactgcatgattcttatggctcaaaaaaatatcacatgggcagagatagcaggggagctggcacagcgatagccttaaaacacaataattatttagaggaaattatatgagaaaactagctttaagtgatgagatacttatgaaggtagacaaaccggctagatatatcgggaatgagttcaactcagtaatgaaagacacatcgcaggtaaatatacgttttgcgatgtgttttcctgatgtttatgagattggtatgtcacatctgggaatccagatattatatgatatgttcaaccgcatggatgacgtgtggtgcgagagagtttattctccgtggcctgatctgcatgaaattatgaagcaggagaatataccgcttttcggacttgagtcacaggagcctataaaggactttgactttgtagccatgacgctgcagtacgagatgtgctacacaaatattttgcagatacttgacctcgcacagataccgcttcgttcaagggacagagcggaaggatgccctattgtgattgcaggcggtccttgtacctacaatccggagccgattgcagacttctttgatatattttatatcggagagggagagacacagtacggcaatctctttgagctttataagaaggcaaaggctgatggtctttcaagggaagagtttttacatgaggctgcaaagattgagggcctttatgtacctgctttgtatgaggtggagtacaatgaggatggaacaatttgctgcatgaagcctaagtatgatgatattcctgtaaagataaaaaaacaggtgcaggtagatttgacgaactcaacttatccggaggcaccggttgtgccttttatcaaggctacgcaggatagaatggtgcttgaaatacagcgtggctgtataagaggctgccgtttctgtcaggccggtatgatttaccgcccaaaccgtgagaaaaaggttgatcacttaaaggacgttgcagcggcacttattaaaaataccggacacgaggagatttctttaagctccttaagctcatccgactacaaggagcttgacgagctcatcacatttttacttgatatctgcaaggaaaagaagataaatatctccctgccttcactcagaattgatgcgttttcgctcgatatcatgcagaaggtgcaggatgtgaaaaaaagcagtctgacctttgcgcctgaggctggtacacagcgccttagaaatgtcattaataagggccttaccgtggatgatatcatgaacggctcaaaacaggcatttgagggcggctggaacaaggtgaagttttatttcatgctcggtctgcctacagagacagaggaagatatgaggggcattcctgagcttgcaaacgatgttgcggcattgtactatgataccgttccaaaggaaaagagagccggaaaatgccagattacgataagtacatcatttttcgtgccaaagccgtttacaccattccagtgggcgagaatgtatgagccatctgagtatctgggcagggccaaaatagtaaatgaccatgtaaaggagcagctcaacagaaagagcatcagatacaactggcatgaggcatatgtcactgtgatagagggcatactggcaagaggcgacagaaggctttgcgatgcgatagtaaaggtatacgaaaagggcggatattatgatgcctggacagagtattttgactatgacagatggattgattcgataaaggaatgcggactggatccggatttctacacgatgagagaaagacctttagatgaagtattcccatgggattttatcgatataggtgtgacaaagcagtttatgataagagagtgggagacagcccataaggagacagtcactcctaactgccgcatgaggtgttctgcctgcggtgcaaagagctatggaggaggtgtctgctatgaaaattagagtgaagtttaaaaaatggggctgcatgaagtttataggacatctcgatatgatgagatacttccagaaggcggtcagaagggcagatattgatatccgctactcagagggctattctgctcaccagattatgtcgtttgcggctccgcttggagtaggcatcacaagtgatggtgagtactttgacatagatgtaaatacaacagagtctacagaaaaaagcatagcggctttaaatgcccagatggtggacggagtagaggtgacaggctatgtgcttctgccggatgatgcaaagaaggctatgtcgcttgttgcggctgcagactatgtgcttagcttcaaggagggctatgagagcccatacaccatagaggagtggaaggaagcgatagataagcacttttttgacgagccatcctttgttgtgatgaaaaagactaaaaagagtgagagagaggtagatataaagcctcttgtatacaagcttacagtcatggaaaataacaaaaagcctgagtttttcatgcaggtatcaacaggaagcattgacaatataaagcctgagtttgtgcttcaagccatatacgaaaagtgcggccttgcttatgatccgcttgccatacaaatccacaggcaggaagtgtatgcaagaaaagacgatggaacactcatttgtctgcttgacatgggagaagaaatctcataatgaacagaattattctgactaaaacagtaaaaaataataatacatacacagtgtatgcactgatggatgaaaacggaaattataaggatttccagctccttccagagaaggatacgataataaacaatatatacgcggcaagggtaaataagatactgccgggcataaatgcggcatttgtgaccattgcgcagaataaaagctgttatctgtcgctaaatgatgcaaaaaatcctgtatacacaaacaaaaaatcaaaaaaagaaggattgtgtgagggcgatgagatacttgtgcaggtcataaaggatgcgctaaagacaaaggatcctgtggtcacaacaaagctttctatattcggaagcaatgtgattctcaccaattttgatacacagataggtgtttcatcgaagctggataaggaaagggcggttcttttacgtaaggctgtgcttttaagttgtgcagaccacgaaaaagagggctatggcatcatagtcagaaccaatgccaaaaatgtggaggataaagctgtttcgcaagatgcgtattctgtagcacagaaatacaatcagataataaaaaaggcaccgcatcaggcactctattcatgcgtatatcatgggatgagcgattatctgcttttaatgaagacaattgattttgccacggtggagtggataaagactgactgcgatgacatatatgacagtcttcttacagagtacggcatatatgaccatgctcctgaaaagataatgagatatgacgattcagctatcagtctgtcaacactctatggcataagagggctgattgataatctgacctcgcgcagggtatggctggactgtggtggcaacatcataatagaacagcttgagacacttacctttatagatgtaaacagtgcaaagaatatatcgtcggggagcaatagcatattaaagaccaatatggaggccgcaaaggagatagccaggcagcttaggctcagaaatatctccggcatgataataattgattttatcaatatgaagtctgaggcgtcaaaggatacgcttattgaagcgctcaaacggtatataaaggacgataatacagtctgtacctttgtggatatcacgaagcttggactggtggagctgaccagaaaaaaagtccacaaatctcttaaacaaattttagaaaaaacacttgacgaatagatagctctatgctaatatactggagtatgccgcacagtgaggtataagtttgcgactttcgcagcaccgtaactggcgagtaatgataaataggaggtgccatatgtacgcaattatagcaacaggtggtaagcagtacaaagtatctgaaggcgatatcattaccattgaaaagcttggcgttgaagctggtgagaaggttacttttgatcaggttttagttgtaggcggagatgatctcaaggttggagatccaacagttgcaggtgcaacagttgaggcttctgtagttaaagaaggcagagctaaaaaggttatcgtttacaagtacaagagaaaaaccggatatcacaaaaagaacggacacagacaggctttcacacaggttaagattgaaaaaattaacggataatgatagctataaccgtttatcagaattcaaaaggacataagatgggctttaagtcaaagggacatgcaggttttgcagattccggttatgatataatctgtgccggggtttcagcgctggtgattaacttcatcaattccgctgaagagctgtgtcatgctgagtacagtcttgatacagacgaagagacaggtatgattgactacagacttgacaagccggcgacaggtgatgttgcactgcttatggattccatgattctgggactaaaaggaatacaaagagactatgggaatgagtacatcattctagacttcaaggaggtgtaagacatgttgaatatgaaccttcagttttttgctcataaaaagggagttggttctacaaagaacggacgtgactctgagtctaagagattaggcgctaagagagcagacggacaattcgtaaaagctggtaatattctttacagacagcgtggtacaaagattcaccctggtacaaacgttggtatcggtggagatgatacattatatgctaaggttgatggcgtattaagatttgagagagttggaagagataagaaacaggcttccgtatatccagtagtgaacgaataagatttaaaccccgacttttactagccggggtttttatgttgtaaattagcaggaatattgatttattttattattactgtgtcttatatagatatagcatagtaatgatttgtcataaagtatactgagtgttttatgcagacattcagcatgaggtggaaaattatgtttgcagatcgtgcaaaaattatcataaaatcaggaaaaggcggagatggtcatgtatcattccgccgtgaaaaatacgtgccgaacggtggtccggacggcggtgacggaggaaagggcggagacgttatatttctcgtggataagggaatcaacaccctgacagattatcgtcacagaagaaagtttgcagcagagcccggacaggagggtggcaaaaagaactgccacggaaagaatggtgaggatcttatacttaaggtgccggaaggtacactcataaaggatgcagcaagcggaaaggtcatagcagatatgtccggtgacaatacaaggcaggtgatcctacgtggaggaaaaggcggtcagggcaaccagcactatgccacatccaccatgcaggctcctaaatatgcacagccgggacaggatgcaatagaaattgaggtacagcttgagctaaaggtaatagcggatgtagggcttgtaggctttccaaacgtaggaaaatcaacacttctgtcacgagttaccaatgcacagccaaagattgccaactatcatttcaccacattacagccaaatcttggtgtggttgatatggatgagggctttggtttcgtaatcgctgatatcccgggacttatcgagggagcatcagagggcatcggactcggtcatgagtttttgcgtcatatagagcgtaccaaggtgatgatacacatggttgatgcggctggtactgaaggccgtgatccggttgctgacatcaaggcgataaacaaagagcttgaagcatacaatccacagcttctcaaaaagccacaggtcattgccgccaacaaaatagatgccatagcgggagacgaaaatgaggtaatttcggccttaagagccgaatttgagccacagggcataaaggtattcccgatatccgcagtaagcggtaagggcctcaaggagcttttgtacgaggtgaagaacctgcttgcaaattgtcctaaagaggttactgtatatgagccggagattgatcctgcactttcattctttaaggatgagccgtacgcggttgaggtggcagccgatggtgcatatgagatatcaggtccaaagattgagaaaatgctcggatatacaaatatggactcggagaagggctttgcctttttccagagattcttgcgtgagcagggtatcatcaaggagcttgaaaatatgggcatcgaggatggagatactgtccgcatgtatgatttcgagtttgattattacaagtaaggagaagagtatatatgaatttatcaagtaaacagcgtgcatatttaagcagccttgcaagcacaattaaccctattttcaatattggaaaggcatcgcttactccggaaattatcgaggctcttgatgcagcacttgaaaagagggagctgatcaaggttgcagttcttaaaaactgcatagatgatccaagagagattgcaagtgtaatcggtgagagaacacactctgcagtggttaaggtaataggcaaaaaaatgattttttaccgtcctgcgaagaaaaatccaaagattaagcttccggaataagccatgaaaacagggatttttggtggggcatttgacccgatacacaaaggtcatatatacatggcacaaaaggcgatggaagagtattctcttgacaggattctgcttgttccgtcaggtcactcaccgaacaagactgagaatgcaatgacagcatttagccaccggtacaatatgtgtaagctggcatcagaagcagtgcccggtatcgaggtgtctgatattgagataaaggatgagtccaccagctatacgtatgtgacactccaaaagctaaaggcgctttatccggaggatgaactgtatttcatcatgggtggagattctctggactattttgagtcatggatgaagcctgatataatagcccaaacagcaataatccttgttatggtgagggaaaattttccaaagcagcagatggaagaaaagattgcacatatcaaaaaacagttttgggcagatataagacttttaaagtgtgacaggatggatgtgtcgtctactcaggtcaggagactgctaagtgccaggtcgcaggcagacgggtataggagtcctaaaggagcggaaatgtttctggatgctgcagttatgtcatatatacaggctaataatttatacaggtgatagagtatggaagtaaaagaaataaagaaaaagctaaagaagagccttgataaacaaaggtatcaacatacgctcggagtgatgtatactgccggctgtcttgccatggcaaacggctattcgatagaaaaggcaatgcttgcaggcctgcttcatgactgtgccaagtgtctttcgactgaaaagaaaatcggactctgtgtaaagaaaaatatagacataacagaggtggagatatcaaacccgggtctgttacatgctaaggcaggcatggtgctggcggaggaagagtatggtattaaggatacgcagatactgcatgccataagagtgcatactacaggagaagcagatatggggcttcttgacaaaatactctttgtggcagattatattgagccaaacagatgtgaagcaccgaggcttgaagagataagaaagcttgctttttcagaccttgataggactgttgcagagatattgtatgatacaatcaatttccttaacacaaagagtggggcaatagatccgactacccagattacttacaattattatgctaaatacagagacaacagggaggaataactgctatgcagacaattgatttagttaaaaagatagtggaagcacttgaagacaaaaaggcagaggatatcacagttctcgacataggagaggtttcttctatagcagactactttatcattgcaaacggaaacaatgcaaatcagcttacagccatggaggatgctgtggatgaggctatgtatacaaacggagtgcatcagaagcaggtagagggaacaggcaactctacatggattctcatggactatcaggatattatcgtgcatctgttctctaaagaagacagacagttctatgatctcgacagaatatggagagatggaaaagtggtggatgtacattcactgtagtatttattctatgattaaggaattataaatcgaaaccggtaatttaaaatatcgcacccatatgccgagctgtttagcttagcatatgggtgcgatattttgcaataaatattagaagaaacgaaatactccaaacactttgccgagtatttcacagtccggaactatgattggatccattgtgtcgttctccggctgaagacgtatgtgaccattctctttgtagaaagtctttacagtggcagaatcatctataagtgctacaaccatatctccgtttgaagcatcactctgctgctcgacgaggatattatcaccgtcgaagataccggcattaatcatgctctcgcccttgactttaagcataaatgactgcttatttggcatatattcagcaggaacgggaaaataggtttcgatattttccactgcgagtatcggctcacctgcagctacacgaccgaccaaaggaacattaaccatctcgcggcgctgtaaaccaaagctgtcatctataatttctatagccctgtttttggcaggatctcttcttatgtagccctttcgctccagtgtctcgagatgagcatggacgctggatgtggactttaaatgtacaccttcgcagatatcacgcactgatggcggatagcccctgtttaaaatctcactcttgataaactccagtatctctttctgcttgtctgaaatcttttctaatgccataggtaaatcctccatgtgaatattaaaataatataatgatatggggcaaaaggaattttgcaccccatgaatgattgtaaaaataaaaattatatcttagaaaaagtatatcataaaaccaaagcaaacgcaaacatatattccgaaattttgttcgtttttctattgacaaacgattgttcgagatgtattatgtaaccacaataacaacaaacacatgttcggaaatacaagaggtggttttatgagaggaaatactttatcaggtagaagaaaaatgtttggatggactgctgttgcatttatagcagctgtcattatattgtgtggcactattcatatttttgccagttccggtgacagcaggccttataacaaatattataccagcgtcagggttgaggagggcgacactgtctggagcattgccgacagatatattgctgacagtcaggtgagcaaaagagattatgtagatgaaatttgcaggctcaatagtcttgcagatggcaatgtccgcagtggcgattatatagttgtttcatattattctcaggatataaagtaacgttttcttgctaaaatttcctgtttcttatataatataggttaattgcagcggatttgggttatagtatctatagcttatccgtttttgaaacaggagattggatatttatgttaaaactattttttgttatatttgcaaattttcatagagcgccgtatattgttcccaaaatgagatacatggctgatcatccgcagaaatattcagaagcggagagatatgatatgatgcggcactgtatagatttaatgaataaatcgggaaaaattacaacagaagcatatggtcttgagaatcttcctgaaacaggtggctatatcatgtatcccaaccatcagggaaagtatgatttactggggattattactacacatgacaaggtactgtcgtttgttatggataagcagaagtcgcatacaatgcttgtcagggaatttgtggatctggttcaggcaaagcgtttagagaaagataatccaaggcaggggcttactataatcaatgaggtagctaaggatgtgaaaaacggcaagagatatgtcttgtttccggagggtggctataagttcaataataagaataaagtgcaggattttaaagcaggaagctttaagattgcattgaaatcacatgttcctattattccgatagctcttatagattcatataaggtgttcaacagctttcatttcggccctgttacaacgcaggttcactatttaaagcctattgagtatgatgagtacaaggacatgaagacgagggatatagctgcactggtcaaggagcatatagaggagaaaatcaaagaaatacttggttagagtcaactttgattattatatagtattattatgaaagacaaagcttattacgaagacgtaaatataaaaaatgaattaaagctcagagatatgatacagaagcttccgaagttctgtatggatttttttatcggaatagatgcggataagtcctcaagaaccaagatagcgtatgcatatgatctacagacctttttcgagtacatgaagagtgccaatccatcgcttaagaaatatgatataagggactaccctatatctctgttagatcagatcagtccttcagatattgaggaatatctgttttatctaaagtattatgagaaggatggcgtcgtacacaccaatgacgagagaggcattaagcgaaagcttgcatcactgcgcactttttataatttttatttcaggaaagagtttatagataccaatcctgcgagcaaggtaacccttcccaaaatacatgagaagaatatcattcgtcttgatactgatgaggtcgcacagcttctcgatgaggttgagtcaggagacagtctgtccaagaaccagcagcgttttcatgagaaaacaaaggttcgtgaccttgcacttatgacactgcttcttggaacaggtatccgtgtatctgagtgtgtggggctggatatggatgatgtagatttcaaaaacaacggagtcaaggtgcaccgaaagggtggtgctgatgtgattgtttattttggtgatgaggtacgtgatgcacttctttcgtactgggaggagagaagcataattacacctgccgaggggcatgctaatgcgctttttctctctttacagaggaagcgtatatctgtacgctctgttgagaatctggtaaaaaagtattcgagactcgtaacaaccgttaagaatattacccctcataagcttcgtagtacatatggcaccacactttatcaggaaacaggtgatatctatcttgttgcggatgttctagggcacaaggatgtaaataccacacgtaagcattatgcagcccaggaggacagcaggcgtcgtgcggcagccagggtagtacatctgagggaggattgattatatgtctgataatataatcacaattacagattttatggaccccaatctggatgtgtatgccagattgacggagaatcagcttttaaacagagccaatccaaaagaggggatgtttatagctgaaagtccaaaggtgatagagagggcactcgatgcgggatgtgaaccggtttctcttctgatggagacaaagcatgtaaatggcgaggcaagaggcattatcgaaagatgtcagaatatacctgtatatactgcgtcatttgatttgctcacaaagctgactggctttgctttgaccagaggcacactttgtgctatgtacaggccgaagccaaggtccatcgaagaggtgtgcagggacgcaagaagagttgcggtgcttgaggatgtggtaaatccaaccaatgtcggagctatattcaggtcagcggcagcactgcatatggatgcggtgctgctcactcctgcctgcagcaatcctttgtacaggcgtgcaatcagggttagtatgggaactgtgtttcaggtgccatgggcatattttcccaagtacaatgcctgcagtgacaacactttttcagatgcttcattgcatgataagtgtgatagccgtgaccaaaattgcagcaacagaaatagcagtgtttataaatacaatattgatgtgcttcataagcttggatttaagacctgtgctatggcgctgactgataattccgtgagtatagatgaccctgtgcttcactcagaggaaagacttgcaatagtgcttggtactgagggagatggtcttcatgagcagactatagactcctgtgactacactgtaaagataccaatgtcacatggcgtggattcattaaatgtggctgctgccagtgcagtggcattttgggagcttgctaaatagtctgatgagagtgctttatattgtaaattttgacattttcgtcagcactgtttctaacttcagttccttcgcatacgcatccgagtggtaaatccgcatagtttgtgctatcgcagaaggcactttggcggctgcagtcagttttatcatctgatatgccgcagatgttggatttattggtatgatactgtttaaagttttgccggctgtagatattctggtcggtattatgtgtattggcattatatatccctgtattattcatgaatagtcctcctgattgatgcttgtttatttgttttttgtttatttgatgttttaatttaatgatatgagggtcaaaaggtattttgcccttcatttatgattaatcagattactgtaatttttcttttttcatcctgagtatgagtttagcatgtgctgtgagtaattattttatgtatcttatttttaattgcgatttcggttaaaggcttttttaattaaaattgtggcaatcataaatataatttacacctttgtacataataatgctgacaggaggtgtctattaaatgattctaacagaaaaagaaacaaacgctattgaagatttaaaaacacaggaacaggcatgcatagagaagtataccaaatacagcaatcaggcaaaggatccggtgcttaaggagctttttgaagaaatagcaagggatgagcaaaaacattttgactctttggatcaggtgattaagggaaaggttccgtcagttgactgcaatgattctaaggggaagaattataagcctgctgcaacatacgattcgcttggcaattctgaggacaagaaagctgactgttatctggctacagactgtataggaacagaaaagctggtatccggcgagtacaattccgatgtatttgtatttggaaattcggatatcagaaagctattggcagatatacagatagaagagcagaatcacgctgagatgctatggaagtacaaaactgcaaatggtatggcatagataaaatataaaaccatagaatttagtacaaagtgtaaaacaggactgcctggatatcgacagtcctgttttataggtttagttgccggttggaataaaaggtctgattgcacctgcaagctgagaaacaggcatactctggagccatacacggccaggtccggtgacaacggtgttgaataatccttcaccgccgaataccacatttttgatacccggaacagtctgaatttcgagctggcagcttcctgtcatagcggctaagtatccggtatcaatcaccagctgctgaccgggtgcaagctcgtattcctttatgtggccgtcaaattctaaaaataccaatccgtttcctgacagacgctgcatgataaagccctcaccgccgaagaaacctgctcctattcttttttggaaaaatacggacagctcaactccggaggttgaagcaagaaatgctgatttctgggcaattatttcctgtcccggtgcaatctggaagggtctgatgcatcctggaaagcatgatgcaaatgctatcattcccggaccacccatagatgtgtagcgattttggaacatactctcacctgaaaatgcacggccaaacattttgccgatgcctccatttgatgtagtctccatcttcatgtttggagtcatccatgacatggcacctttttcggtaatcatagtttcgtttgcctcaaggttgcagatcacaaccggtaatggctccccctcaatattgtagttcataaatatcctcctttagtttaaaaaaatggtttgtaaaaattttatatttataattctaacacagtaatacgtcacttgacaatataattcataaatgtacacgaaagcttataaatgaatacaaattgcctaataaatgcactttagggattgcggtgttcatatgattttgactgaaactatgtggacaaagtcacagacagacttgtttattttataaatatggtttaaaataatatgcaaattgttggataaaaatggtagtaaaactatatgtcacataaattgtaacaaaataattatatccaatttataacatgtaaataacatatttgaggagacaacataataatgagatttgtaatacagcgtgtaaaccatgcaaagtgcactatagatggaaatataaccggcagcatagaaaagggactgtgcgttttgataggcatagcagagacagacactaaagagattgctgataaaatgatcaaaaagcttataaacatgagaatttttgccgatgagaatgacaagacaaatctttcgataaatgatgtagacggaaagcttttgctcatatcgcagtttacgctttatgcaaattgtaagaaaggcaatcgtccttcatttgtggaggcaggaagtcctgatatggcaaacgagctttatgaatactgcatcagcgagtgtgataaggcagttcccggagtacaaagaggggtgtttggagccgatatgaagatagagcttgagaatgacgggccatttacgattgtactggattcggacaagctgtaaaagatataagtatgaaaggcatttttatggaaaaatcattaaaaaaagatattataataaacaggcttcctgtagttatatattttatactgatttttgctgctttaatggtgataataagtgcagtagctccgatgagtaatcatgagccaaagacgacggatacatattctgatttttcaacaggatggttaaattgcgaggagtctgaggcttcactaaaccatttatccggcactacagtaatccatcgtactataacggcagctgattgtaataaaacattgtttttctttgcaaaaacatcaaatatcaaggtgttcatagatggggtatgccaatacaggaacaatcatttctgttcacagttttttggaaagacacccggggctctttttgtaaatgtacttatccctgcaaaaagtgatggcaagctactggagattgaaattgaaaatccatataaagatgacgacagtgcaaagcttgatgaaatgtacataggcgatatttctgatatcatacaatttcaacaacaaaaaagattcaattctttctgtatcagctttattattatggtactgggtgttgtaatgcttttactatttattcctcttacaaggcaaaagatagtaggcattgagtttttgaatcttggtgttacagcatttgtatcaggcttatatcttacaacagacggacgatatctacagcttgtttttggagatgcccatatatatcatgtgatagcagaaacaaccctgaggctttctattctaccgtttttaatatttttaagtcagatgtatgaaagctatagtaaacgtataagcgcgatactatgcgtaattggcgagatagcatttgcaggctgctttatcggtgaaataaccgaaatcatggattatcatgagacactttttctggtacatgttgtatttgcaatttcgatgctctttattcttgtttcgacgataaagggcattgtaaaggcaccaaaagagaatatatatcacaatataggctgtattgttttaagctttatggctatgacggatatcataattctatggcgaggcactggacgagaaacaagctattttatcagactcggcatattgatattctttttcatggaaatagtccagattataaaaaagttcctcgcctcttatcagcgcaatatcaaaaatgagttgcttagcaggcttgcttatcatgacggattaactgatttactcaatcgtacctcatatatggaaaaggtcaaggagcttgaagatgatgaaaacccatacatgctgattgcgatttatgatgtaaacaatctgaaaaaggtaaatgatacaatgggacatcagaagggtgatgagatgataaaacgcgttgcagatgtgatgagtgcttctcttggaaaatacggacagtgttaccgagtcggtggtgatgaattcgtatttatctcgacaaaaccggatatcgagaccgtattcatgaatgcaagtaaaaaaatgatggataatctcggatgtatcactgatggaaataatatagtgcctatcacagctgccatgggatatgctgtgaaaaacgataacagcacaaaggatattaatgagataatccgtgaggctgattcaaggatgtatgagaaaaagcgctctatgaagcatcggaaggcttagtgcatttcacccaatcatcgatattgccgttttgaatagcagaaaacagtctcttcttgacacccggattttccatattgagctgtctgacaagctgctttacatattcgcgccgtgtgtggccgtcgtaagggcatggattcttgcacaccggcagattgtatttattcttaaagcccttcacatcagactcgccgacatacataagcggacggatgatggcaagcccactgccgtccagctgtgtaacaggcgcgaaagaataaaactgtccctcatatagcagggaaagaaacatagtctctataatatcatccatatggtgtgcatatgcgattttgttgcagccgacagacagcgcaaaatcattcaaagctccctttctaagctttgcacaccatgagcagggactagcctgattcttagatttctcaagagatattcttccaatatcagttttcaccacataaaactcaacagagagctcatcacacagcgccttcaccggagacaaatcaaaatcctcatatcccaggtcaaccgctatcgctacaagctcaaagggcacaggataaaagcttctgatgccggaaagcgcatagagcagcgtaagagaatcctttccgcctgagacaccgatggcgattttgtcattttcagttatcatattgtagtcgtcaagggcctgacggaccttgctgtataatttttgtaatttcatggtaggtattatactataaatctgtgaaaaaacaaagtttcgaacacaaattaagattataatgatacaaattctgaaaagtgtaatattataggaataagatatcaaatttttgtggagaagatattggagaggaagttgatgaatagaagtccggggggcagattccctcggatttggcgtaatataaaaaaattgggggacatgagaactatagaataactatttgacatggtggacagaaaaaattattataaacataagaatagtagatttgaaagtttaagggatgattaggctatggcaacaataaaagatgtggcaaaggcagcgggagttggaacgggaacagtttctcgagccttaagtggaaaaggatatgttgattctgaaaagaaaaagcagataattaaaattgcagagcaattagagtatgatccttcagcgttattaaaaagaaaaaacaataaaaaagttaaaagtggtttaataggagtagttcttccgaatagttcacaacctttttcggaagttttttgtggcatgtagagaaagccttggaaatgcatgagtatcgaacagtaattattaatgttggaggctcgtccaaaaaaatatctgatgcgattgacttggtagataaacatatgttggatggattgatcataaatgctgatgtagataaaagtgatatagagcgattacgattgattccagcagtaagctttgagtgtgaaatgggagaaggtattccgcttgtagcatctgatcatataaaaggtggcgaacttgcagcaaaactgctctttcgatgtggatgtaagaatgtagctattttaagtataaaggcaactgcacctgtatatgcaaggcgtcgtattacagaatgtcagagattattgaaaaaaaaggtgtaaaagtaacgattgtagagcatgagggtggatcagaagagtttcatgtcatggaagaaaagataaatgagtatttgaatactcactcagaagttgatggcatttttacggaggatgtggaggcatatttttgcttggtgcaggcgaaaaaacgaggaatttccattccaagagatcttaagattgttggatatgatgggaatgaaataacacgtttagttagcccacaggtaactactattgcacaaaatacaaaaaaattagcagaaacatgtgtagatgtactgaataaaagaatcagcggattggatacagaagacagatattttgttcctgttaaaatccgaatgggtggaacgacataatatcgttccataaaatatttgtatataatttataatgcagaacgttaaaacaaggcgttctgctatttttttgtgcagaattcataaaagacttgaatattggcttattataaagtagcatttgaacaagaaataagaaaacaaaagttgtgatgaaaaggagaacataatgaatcaaatttatacttccgatttgctttcttttcaaaaaagattagcacctacggtggacagtgatgtagtgattgacagacccaagacagaaattttgccggagccatatgtgattacccatgagagaaaaattcgatttaaactatattatccgaatgcaataaaagtagaaatgtgggattatttaaaagaatataagcttgaaaaaaatggagattattggtgcggagaatttgatatgggggaaggattcattgcaatatttctcaaagttgatggcacaagtattctatcagagttttttccgataggatatggaggaaacaaagcgataaactatatagacgttcctgaacaggatcatccaattgagctattaggagaaaatcatggaagtgttcttagtgatttttttgaaagtaaaataaccggacaactagagagaattatgatttatcttccaccagaatatatgcaaaatacagagaagaaatatccggttctgtatttgcagcatggacatggcgaaaacgaaacatgctgggtaagccaggggaaaatgaattttatatatgataatctggtacatcaaagaaaagcagttcctgctattgttgtgatggcaaatggaatgatatataaggagagtggagacaaaagagaattaaagtatcgtgatatgtcagaatttgtaaaggaggaattaattccttatgtagaaaataaataccgaacctacggagataaagaacacagggcaatggctggattgtctatgggaagtttacagacttctattacggcatttgaacattctgaactgttttcatatgtgggagtattcagtggatttgtacaagatatccttacacagaatcagagtcatttgactgaaaaaaataaagaaagctttcgagaaaacaataagttattttttagagggattggagctgaagacagatttattgatttctttaagtcagacgatgaatttcttgaaaagtctaaaataaaatgtgagagaaaaatatataaaggtgatcatgaatggaaggtatggagacgctgcttatatgattttgctcaactgatttttagagaagataattagtatagttattgataagtgaggaatgaggaaaagatgacaggagtgcaaatagtaggaatagcagtgatcagtttagtggttatattcttagtggcagaatactttatggccaattttatggcaacatatattttgacaccgccttctaaattatgtccaacgccggaacagatcagacaccggatttcccagactggaagggtgactttgaaaatagtgtacaaaaagaaaaggaagcttatattcgggaacatcggcttacggtttggagagaccatgatcatatgcatacgcatcagccagattccatttttgcaggcgtaataaagtatctgggatgggagtcatattttaacacagaaattagtggaatgatgccgtttttttatgtttttgatattccggaatgtaccgtgtctgaacttggagaagaattaaaagaaaaaataggcatgaatggagtacgtattgttggaaatccggaagataagatgaaaagagtagcgattgtggcacatttgtatcctaatagtgccatggtagacgaaataaaagaagatggatattaccatagttatgacatggaaattatgaaatatatggaaacagagaatattgatgctatcattccgggagaaatcattgaatggacaattctttcttatatcagggacgctgcgtatatgggaaaacacaaagcatgtttcaatatcgggcattttaacatggaagaattaggaatgaagtatgcggcagattggatcggtgaattactgaacaatgagattccggtaaattatataccgacagaagatggttggacatttctatagaagaggtgattagaattacactcatcgtattccaaaatataatgatgcagaacgtctgcatgtgttcagggaaagtgccttgaaaggtatgattgctgctggaacttatacaaaggaaagagttgagtgtattcataaccttcaggttaaggaagatgatgcaaatccaaaatacagtaaagagattgtaaagaaatatacaaaatgtgtagtcgtcgtaattatgcattttcagaagaacggaaataaagaatttctcaagatgtgaaaagagattatattatttataaatgggaaggagtgtatgttctgatttcaatgtaaagcgataaggggaaaccttatcgctttattaaaagaagaatgtgggattgataatcatttaattttacataattagatgtcagtagaaagttttttaatttttcttatagcaatacgataagaaatgtaaaaaaataacaatactccaaggaaataaacagttagaaatattaaggagacaataattctttgattaatctgttcaagatagaaaacagtatcaatttggaaactctcaacaaaaacgataatagtatttaaactagaatagcatagtgcaaatagccaacaccagagtggaaaatgttgggttccattaaaaagaactccttttattgacatccaaatgattaacacatcaggcgctaatggaataacccaaccgtttaagcttgttttaaaaaaataatctagtagataagtaagttcatttgctataattataccccaaaaaagtttaacataaattgtgtgccgaatatttgtgatcctttcatcacagtgaatggtggttttcataagttgtcctcctcccaaaataaatcgtttaatgttttgttaagtactttacatatccgaatacaaagctgaagactgggattaaactttccgccttctagtaagttgatagtagggcgtgtaacattaactttggcagccagttcttcttgagaaagattcatctcaacgcgtgctaatttaagacgcatatttttcatttatacaacctcctcctttctatatgcattatatgatatatcgaactaaatgtaaagtatatattacaaaaaataataaatatataacgttatgtgaaaaagattattatgtttgggtaaatagtaagctgagaatcccatttgtaacacaagactccctctttgtaaatgaaagtcctgttttgtaaccgagattcccggtttgtaaatgaaagtcccggtttgtaagcaagattcccgaattttcatttccattacgatatgatataatacgttcagcaataaattgaggttggttttattaaaaattaaactagacgaatctgattcattaaagtaatatataagaatatgaagtcaagttttcacagttcccagattatcggcacattgtgtcgacaatctggaagcagtatattttttattattttatgagactgcaaaataaaagattttccatctcagaaagtgccaaagtatggacaaaggaacttagatggcaaagctaaaagacttattgtaaatatcatttgaattaatgggaggacaaaatcatgagcaaagtattagaagaaatgaaaaccagaagaagcattcgtaaattcaaaccggacatgattccgcaggatattcttgaccggataatcgagaccggaacctatgcggcaaacggcagaggcgcacagaacaccatcattattcaggtgacaaataaggaaataagggatgaaattgccaagagaaatgctgacataatgggaagtaatactgatccattttacggtgcgccggttattcttatcgttcttggaaagaaggactggcctacacatgtctatgatggcagtcttgtgatgggaaacctgatgcttgcagctcatgatcttggtattggaagctgctggattcaccgtgcgaaggaagagtttgagtctgactggggcagggagcttctcaaatcactcggtattgaggatgagtatgagggaatcggacattgtgcccttggatatgttgatggagattatcctgacgtgattccaagaaaagagaatcgcgtattttacatataggagataatcaacatgaatttcttatttgtagcactgggcggagccgtaggtgcaatggcccgatatgccatcagccttatacctttaaaaactgaatttccttttttgactttaatcaccaatgtaatcggtgcaattctgattgggtttattgtcggaatcacaagtggcagggatggagtatccaaaaatatggttttgttttggaagaccggcgtatgcggtggctttaccacgttttctacattttcactggaagcctataatctgtttgaacataatcactgcctgcttggatgcggatatgtggtgttgagctgtttaggatgtatactcggtgtaatgtgtggtgagaaacttgctgcaataatcaagtgatgagtatcgtgcggttttgcgaacgtgagtggtgtgattctgaatagacaatacaaatcgatgggaggtatacatgagtattttaaacgtagagcacctaagccatggttttggcgaccgtgctatttttgaggatgtttccttcagactgttgaagggcgagcacatagggcttgtcggtgcaaacggtgagggaaaatcgacttttatgaatattatcacaggcaggcttatgcctgatgagggcaaaatagagtgggccaagaaggtgcgtgtgggttatctcgaccagcacacagcgcttgaaaagggtatgactatcggctccgttctttcctctgcatttgatttcctttatgatatggaaaatgagatgaatgacatatatgcgcgtcttggcgatgtggacgaggacgagatgaataagctgatggaggaagccggcacgattcaggacatgcttaccatgcatgatttctatatgattgatgcaaaggttgaggaggttgcaagggctcttggacttttagacctggggcttgataaagacgttaccgatttaagcggtggtcagagaaccaaagtgctgatgggaaagctcctcttggagaagccggatattctgcttttggatgagcctacaaactatctggatgtggagcatattgagtggcttaagcgatatcttaatgattatgagaatgcgtttattcttatttctcacgatataccatttctaaacagcgtggtaaatctcatctatcacatggataataagaagctcgacagatatgtaggtgattatgacaagtttatggaagtttatgagatgaagaaagcccagcttgaggctgcgtacaacaaacagcagcaggagattaaagagctgaaggattttgtggctagaaataaggcacgtgtcgctacaaggaatatggcgatgtcacgtcagaagaagcttgacaagatggatgttattgagcttgctgctgaaaggccaaagccggagtttaactttaagacagcgcgtactccggggcggtatattttccagacaaatggtctggtcattggctatgatgatccgctttcatctgctctcgaccttgagatggagaggggacaaaagattgttcttaccggtgcaaacggcatcggaaagacgacattgcttaagagtattcttgggctgataaagccgctttcaggaagtgttacacttggagattatctggaaatagggtactttgagcaggagatggatcagtcggttacaaccacatgtattgaggagatatggaacgagtttcctgcattttcgcagtacgaggtgcgaagcgcgcttgccaagtgtggtctgaccacaaagcatattgaaagccaggtgcgtgtgttaagcggtggtgaacaggcaaaggtacgcctgtgcaagctgataaacagagagacaaatattctgcttctggatgagcctaccaaccatctggatgtggatgctaaggatgagctgaagcgtgccttgaaggaatataagggcagcatacttatggtatgccatgagccggatttctatgatggacttgcgacggatgtgtgggattgttcaaagtggactacgagattatagatttataaattatgaattagatatgcatgccttttaagacatagatatttagagcaggagatgatttttatgcatatcagtatacttttaatggaacagataatagagctttttatcatgattttaatgggctttattattgtgaaaacaggtattgtgaaggatgaggacagcaaggttttatcaaagattgtgctgtatctgattataccgtgtgttattatcaatgcctttcaggtggattacacttcaaaaacagtgagaggtcttttgattgcatttgcggcatcggtgattttgcagttggttttgctgtttatcatttctgctatgggcaggcttttccatatggatgaggtggaggtcgcatcagtttattattcaaattcaggcaacctgattgttccgattgtgacatttatactggggcgggagtgggtgctttacggctgtgctttcatgagtgtgcagctggtatttttgtggactcactgcaaaaagattataagccgtgaaagctcctatgactggcgaaagattgtccttaatatcaatatgatttccatagtaataggtgtggtgcttttctttacaaggattcatctgccacagattatcaatgacacaatcggttctgtcggcagtatgattggacctgcaagcatgattgtgacaggaatgctatttgcagggatggatttgaagaaggtttttgccaacagaagggtgtattttgttacctttctcaggatgcttctggttccgttgatatcgcttattcttattaaaatcagccatatggcatatctttctgcagatgcgccaaagattatgcttattgttttcttggcggttattacgccttcggcatcgactgttacacagatgtgtcaggtgtatggcaatgattcaagatatgccagcgcaataaatgtagtgacaacgctttgtgctgtagtgacgatgccggttatggtgcttttgtatgaagaatttatataaaaacgaaaagtcatgaagcacgtttttaaactagaaggtcatcacacagtccctggtgatttcatcaagcgaagatacaccacacatcttcatggtgtcttcaagctctgtaccgattttgtctatgtatgcacgtacaccatcggccttaccgccgtatacagccgttacaaatggtcttgcgataagaactccgtctgcacccagtgcaagggctttaaagacgtctgtgccgcttctgatgccaccatctacaagaatcttaatgtctgagccttcaagagcctttacgatgctttcaagcacctcagcagtggcaggacactgatccagcacacgtccaccgtgatttgatacaataatagcgcttgcgcctgcctcttttgctttaagcgcaccctttacagtcataattccctttacaataaatggggttccagccatctgtatgatatcgcaaagctctgaaactgttttgcttccggctggcggatcaagatttttgaggaatggaagaccggctgcatcgatatccatagctactgcaaatgcgcctgattcatgtaccagctccattttctcacgtatggtctcaatgttccatggctttacggtaggtattcctgcaccatctgcatttttgatagccttggtggctgcaaccatgacatttgggtcagttccgtcacctgtgaaagctgcaatgccgttctttgcacaggctgacacgaggatatcgttgtatgtcacatcatccagacagtctccgtagtgcagctgtactgcaccgacaggacctgcaaataccggatatttaaaagtacggccgaagagtgagaaagcggtgtctacaggcttattttcggcaatagtatccatgtttacacggatttgtttccatttgtcgtagttgcgtatggctgtgtcaccgatgccctttgagcctggaccgggcatctggtttttgcatgcgcggccgttgcattcaggacaagccttgcagtattttccaagacgtggtctggcattttcgatacattctgtatagttcatatttttcctccaagtgtaaatctttttaaattttattattgagattataacacgataatttttttatgtatacaaaagatgaaaagctcttgacttggagtggacttcaagtgatatagtttcattgtaacaatcaaaaaggaggcggtgtgagtgactatcaaggaagtgagtgagcgttttggtgtgtctactgatacactcaggtattatgaacgtataggtctgattccacagattgcacggactgcaggaggtatacgcgattataccgaatcagatatcagctgggtggagcatactatatgtatgcgcaatgccggagttccgattgaggcgcttatagaatatatcaggctttttcagatgggagatgccacatttgaagcaaggtgtcagcttctcaaggagcaatacgagcagcttgatgagcagaaaaaacagattgaaaacacgatggaacgcttacagtataaaatttctaaatacgagaatgcgataaagacaggtgaattgacctgggacaaataggaggacaaaatataatatgtatcttgagaaaattaacggaccagaagatgtaaagaaaattaagatagatgagctgccggtgctggcgcaggagataagagatgcccttttggtaagagcaagtaagcatggcggacattttggaccgaattttggaatggtagaggcgacaatcgctttacattatgtatttgaatcaccgaaggataaaattgtttatgatgtatcgcaccagagttatcctcataagatgcttacggggcgtaaggaagcgtatttgtctgaacagcactatgatgatgtgtcaggctatacaaatccaaacgagagcgagcatgatttttttacagtcggacatacatcaacgtcggtcagtctggctgcaggtcttgcaaaggcaagggacttaaagggtgaaaacggcaatgtgattgctgttatcggagacggctcattaagcggaggagaagcacttgagggacttgattttgctgctgagcttcaaagcaattttattattatagtaaatgacaacgatatgtcgattgctgaaaatcatgggggtctctatcagaatcttgctctgcttcgaaagactgacggtcaggcagaatgcaatctgtttaaggctatgggacttgactatgtgtatgtggacaggggcaacgatgttgcagctcttattaaggcatttaaagaggtcaaggacagcactaaaccggttgtagtgcatataaacacacttaagggcaagggctatgcaccagcagaaaaatgtaaggagcagtggcattacagcggtccattcgatatagaaacaggaaagccgctatttgacaatgtggaagaggattattcttctgtgacctgtgaatatctgcttgaaaagatgaaaaatgattcttctgttgttgcaattacttccggtacgccgactgttatgggctttacagaggataagagaaaagaagctggcagtcagtttgtcgatgtaggtattgcagaggagactgcagtggcactggcatcaggtgtcgcagtaaatggtggtaaaccattttatggtgtatacagttcgtttgtacagagaacctttgaccaggtatcacaggatgtctgcatcaataacagtccgattacaatggtaatatatcagggttccgtatatggaatgaatgatgttacacacttaggctttcaggatattccgatgctttcaaatattccaaatctggtatatctggcaccggcaacaaaggaagagtatctggccatgctcgactggagtatggagcagacatcttatccggttgcaataaagctgccgggcggaccgatgatttcagatggttcaagggtgacaaaggattttggcagactcaacagatatgaggtggctcagacaggagaaaagattgcgattatcggtctgggaaccttctttggactggcaaaggaggctgcgaaacttcttaaagaagaagccggaatcaatgcaactgtaatcaatccgtattacatcaccggattggatgaggcgcttttgactaagcttaagcaaaatcatgatactgttattactttagaggatggtattttagatggcggctttggtgaaaaaatcgcacgattctatggtgcaagcaatatgaaagtgatgaattatggattgaagaaggaatttcttgacaggtatgatgtggatgctgtactgaaggagaatcatctgactgcagagcagattgcggaggatgtgttatctattttataataaaatcataaattccaaatataaaagacggctgatttttcaaccgtctttttataaaatttcaaagcttgtaattgagatgagcttcacaatttgttataataccttcataatcgaatagggaaagagtcgggtgtgatttttcggttgcccctagtacagaaggatatgctgtttatgtccggatggagaggaggagtggtaatcatgaacataatggaagtattaactctgttgcttgtaatctttactgcactggcatacatagatggacacaataaaagaaaatagcacccaccgaccaaagtagtgctatttcttaattaagatttttatctactgaggcaatcggaagttttatatccgatcaactctttctttatctcgattataatataagacggataatttttcaaccgtctttttgtgtataataatataaaatatctgaaaaataacagatgtggaaaattccagtcattaacagacatggacaaaggaagcagtgtattaaaggacgaggtatgtactgcaagcggagcggtactatttttttgcggcacacatttattcgctaaatctaagtttaacgaataaatgaccttataaaagtattaaagtactacaacaaaaacatacatctgcttattttttgcataatacctgcaatttcgatacgtacaacaatattatgattaaagggtcaaaaggtatcatcgaagcatgcatcgatgataccttttataataatacaagaataagccaccgaaacctctatttgtatcagctccgatggctttatatctatagtttttctatacaacaatacaattacttattatgcaattatttattgtgatttctcatgcattccctgtatttaagtataagctcgattgagtcctcaactgatatctggcttgtgttcaggcacaaatcatagcttcttgcgtctccccattttttactggtgtagtaattgtaatagcttgagcgctctttatcttttttcttaattatgtctttagccttgttctccgggacattgagtctttcacttattcttttaattctgtcgtccatgttggaacgtatgaagatattgagacaatgcggctcgtctgctaaagcataatctgcacagcggcctacaataacacaggattcatttgccgcaatctttttgatagcatcaaactgtgctaaaaataccttgtgattcagaggcatatcaagaaacggtgctgtggaataagagccacctgtgtaggtgtccatgaccagcgaatataaaaagctgtttgtaggcttttcgtcatgcgactcaaatatttcctcgcaaagtcctgattccttagctgccttctgtaagagctctttatcataaaatttaattccaagtcttttagctaaatcttgtccgacctgttttccgaggcttccaaattctcttcctattgtgtaaatttcgtttgatcccataattcagacccccttatataaataattaatactatatcactatgtgataatttaatttatttgttatttatattatataacacttcaagcaaattggcaaagtattttggtaaaggtgcatcaaattccatgtattcgccggtttttggatgaacaaaccctatagttttagcatgcaggcactgtccttccaggcctttaaaccggtttttggtaggtgaatagctcgaatacagcatatctccaagcaagggatgattaatacttgccatatgcacgcgtatctggtgtgtcctgccggtctcaagcttaaactgcatatatgtgtagtcaccaaagcgttcaagcaccttataatgtgtgacagccggcttgccgtttttctcattgatcgccattttcttgcggtcattgggattcctgcctatggcgccctctatggtgccctcgtcattctttacattgccacagacaatgcccacgtatatacggttgcagctatggtcctttatctgttccgatatctttatatggctttcatcgttcttgcagacaataagggagccggtggtgtccatgtctatgcgatgcactataccgggccgtatttcgccgtttatgccgcttaaagagtccttgcagtggtacattatggcatttacaagagtatcgctgtaatgccctgctgaggggtgtacaaccatgccctttggcttgttgactaccagtacgtcatcatcctcatagagtatgtcaagaggaatgtcctgtggcaggataggtgtctgtacggcatcaggaattgtgacatctactatgtcatcagtctttagcctgtaatttgctttttgtggcttatcattgaccagtatttgattttcttttagtatccgttgaaaaaaggagcgagaaatatccggataaatgctgcttaagtatttatccagtcgttctccctcctgttcactctggacttcaaatgtatctttattcatagtgaaagctttctctttttttattttagtaactatttaaaactacattgcacactttaaaaagcgcataccgcactaattttcatgctttccatcatgctttttgtcagggaagattaaggaaaaatcctcctccttgtagtaaaacagcccgagtatgataaacataaatgctgctacagtgacgtatatatcagctacattgaatatcggaaaattaatcaggctaaaataaaagaaatcaaccacataattattcacaatacggtctatcagattgccgagtgcacctgcaataaacagtattacaacaacattcagcagtctaaaacgttttgagacaggtattttgcgataccatacacacaaaagtataacaactgcaatggtaatcactgagaaaaaaatcattttggcacgcaaaaatgccaatggattctcagaccaatatgtaaaatgaaagatattctgtattattgaaagcagatcaacaccaaatgcagcactctggttttccaggtatctaagctcgaatactcccggaatgagaacaaacacacccgtggacgattgctttaggtttataacggccagatactttgtaagctggtcaattgctacaagaatcaatgtaatgatgcctgctgtacacatctgtttttttgttttatttttcttcatagctgattagagactccgcttaataagatgaacccgggagatcaaatgaatccatgagactctggatatctcctgagatatctactccgtgtggtgtggcgatgaagataaagttggatatcttctgcagattaccgtgcagggcatatgctgagcctgatgtgaaatctatgatgcgctgtgccacatcgacattaagtccctccatgttgatgacgactgtacgtccgttaagtaatgtgtctgttatttctatttcgtcttcaattgaacttggttttattacgcaaacttccatgtctgatgatacctgctttctggatgattttgatattggtgtaatcttggatgtagtcttaacaggcttctcctttggtgttgtatcacgccttgtgctttttatggtcggttcctcttcagcagcctctttttttctgcggaaaggatttcttggaagctcttcttcttcctcatcatcgaggtaataatcctcgttatcgaactcctcatcgtcctcagaatttaaactcattttgtcaagaatcttatctatgaaactcatttctatattccttttctatttttattttgtgtatagcatatgcaaagtatcagttagccttgctgtagtcgcgctctccaaatattccggtaccgacacgtaccattgttgcgccctcttctattgctactgtgtaatctcctgtcatacccattgacagaacattcatactgacattatctatgtttttttgtgctatgtcaactgataattgcttaatatctctaaagtattgtctgttatcctcaggatcatctacaaatggtgctatagtcataagtccttttatatggatatggtccagtttagcaatttcttcaactaaagagatagcttcatctcgtgatgtgccaaacttagatgcctctcctgcaatattgacctcaaccagtatgtcgcagctgcagtcatgctttatggcctgcttttgtatctcctttgccagatgcagtgaatctacagagtgaataagtgatgtttttccaactatatacttcaccttgttggtctgaagatgcccaatcatgtgccagtgaatatcttttggcataacctccatcttttcacacatttcctgtaccttattttcgccgaactcacggatgccctcatcgtatatctcactgagcatctcaacaggtttggttttgctgactgcaattagtgtgacatcactatagtttctgtgagctctgtcacatgcggcctttatattttgttgaacctgatgtaagttgtcttttaacataaaatctgtcccttctgtatattttatcaatatttattaccaataattatttggttatggtctggttttccttcacggatttgccatccaaggctatatggtcataaagcgaaatgccatatggcgttttggcttctacaattgtgtagtcatcgtttgatgcaagtacctttatctgcttaaacacagcgtatcctttgttgatattgtagacacctgtgagcttgtccttatctgttcccaccctgtaggttgacgaagaatcaggctttacaatgatatcgccgtccttaagatattcatcatctacgaaataaaagtcatcattctggctgaatattgttggactgactatattaactgagccactgcttttatcctttatcatgagcgatgaatcatcggaatcgccgcttgcagtgaaataatccttaggaatagtgaaaaattcctttttggttatagctgaattaggtattttaagccctgtgtctgctccaagcacgagctctatattggtaaaacgctcatttatgtagcggatgagcgagtttttcatattcagcttcaggaaaaaagcatcatccttcttcaaaaggctgaacgataccgtggttgtatagtcatcatcgcaaaatctgatttttatgactgacttgtcattcaggctcttggcaacattgtcaggaacatttatgagtatattccagttttcacttgtgatcagcttataaacaggatccagctgattgatggtgctgttgttggttaaatcagtctcttcataattagtgttgttgtactgatccatagtgaagctgtctgtagtgacatcctcatagccgtctattccgtaatagactattccgggagctgtcggcttatatgtatagaaggtgttgttagcctcagcagtactgatagtatctgccaggcttgtcagtgcattttgactgagaacctgtgtcagctgtgcagacagatcgtttttgaaggtataaacctttgaaaagtatcgtctgttgtagccggatgaaaagctgtttatgtcagtgataatcttcccggcatcctcgtcagtgatggcggaagcatcattttgagcaccggtaatctgggttgcaatggagccatctgtatcaacagagtagacaacatcacttgttgcaacctttgagccgtttgacacaaagtagttgaggtttcctgattcctcagcatacactacactttcctcgcggattatcatgcccttatatatgttgttggtcgctatagtaccctgttgtacctcgtattcagataccgggtttgaggtgaaatacgtaaatatgtgaaaaatcacatagattattattacaaaaaacactataaaaccgatattcagattgaagccggtgcgatatttcagtacttttttattctttcgggacacaattttactccttaaaaaagggatgtgaaatacacatccccctaattaatcatttataaagaaatgataacctttgccttggcacattcaggcaacttgtcaatattccttgaaacacttaagatgaacttcaccttaaacttctcgctgattatatcaagcttttcgattgccttggtgatatccccctcatcatcaagtgatgcaattgtaaggaagctgtctaaatacatctcctccagatcatgatcctgcgatatgattccgcatataaatcctaaaaattcatcacaattgtcaataggatagtccataacattgattagtcgaacctggttattaagctcatacatgtgcttctggctcttatcaagaaaaactatggaaccctcatttcccttaattgatgaatttaccttgtctaacagctcttttgtcttgcccttgcccttgtctccacaaataatttctatcatggctcattcctcctatggataaatattgtgattattaataaaaaataattgtatttttatattattatagtataaataaccataaaactcaatatttaattagcaaatccactaagtatttcattcatgaagctataaagatcctttttaccatctgccttgtaaactatgcttatgatgcgctcatttttagcattctggcttagcagtacgaggcaatgaccggcttccccagtagtgcctgtctttcctcctgtcactgtgacgttttcaggggctgtatatgctccggtcagatagccgcaggtattcttaaaggtctttgaaacagccgcgccctgggcatttgtatatgccacatcatgggtctgtgaactgatgattgcaacaaagctctctaaggatatggcattggaaaaaatgaggtacatgtcatatatggtagtgtaatgattttcatcaggaagaccgcttgggttgacaaaactgctgtttgtggcaccaaaactttttgcagtgctgttcatcagcttggcaaattcttctacagaaccactacagtactctgccagcgctattgccgcatcattgccactctcaagtaagagcccatacaataagtcctgcactgtaataacatcgccctcctttaggccgcatacagatgatgaatggccagggtttgcagcgtcatggcttactgtgactgtcgcatttaaatcacagtttttaagaattatgtatgcagttaaaatctttgtagtgcttgcaggatagagcttttcaaacagattctggctatacagcacctgatgagtgtcaatattaaaggctccggctccctctgcggtttttgcaaactgcatattgtcctgaccaaaattgacatcatttgtgacgcaaaggttggacgcaaaaaaattacttccgttgtatccatttatataatctgtggaataagtatcatatgcattctcaatctttgtaccacagcctgtcataaaaaccgctgctatgcatgtcagacatagcagtcgtttaaatctttgtttacttgtacatctcacgccagtcaagatctcctctgtccaatgataaaatgagcagctctgctgtagccagattggtggcaagtggtatattatgctcatcacaaatacggaaaatactgtttacctcaggctcgtgtggcttaggctttaatggatcacgcagaaagatgacaaggtctatgtcattgtgctcaatctgtgccccaagctgctggatgcctcctaagtgtcctgcaagatatttgtgcactgagaggtttgcaacctcctctatcagacgtcctgtggtgcccgtggcgtacaaattatttttgcttaagatacctctgtatgctatgcagaagttctgcatcagttttttctttgaatcatgtgcaactaatcctatgttcattgctaacctccctatgaatatttcttcggctgtaatcctacattcagaacaattcccattcccatgtacagtgaaacaagtgacgtaagtccataactgacaaatggaagagtcataccggtattgggcataagacctgtggctacgcacaaattgataaaggcctgaaagcctataagtgctcccatgccacagcatatgagctttccgcttgtgtcctttgccttccttgctataagtatacactcaattacgataagaagcaaaagaattattatactgattgtaccaataaagccaagctcctctccggcaacagcaaatataaaatctgtttgaggctctatgatgtagttggtgttcttcatagaggttacaacagagttgttaagtcccttgccaaacaactgtcctgagcctatagcccagatagagtttctttgctgtgctgctgtatcagcgtaatttgtcgggtcaagccacgacattatacgtgtagcagggtaaaagccttttttgatgagggcatcggcatgtgtatatatgtagcttatcactatcaaaactatcggtactgaaactccaagtaccggcattattattttataacttaatccgctaataaacaagagggtagcgaaaattaatgcagtaagaattgttgttgagttgtccggctgttttaagataagaaataaaggtataccggcaaaaattgcagataatgcaagagttcttactgtatttatactatcctcaaacctggaaaagaaataggcaaagaacaaaatcagtataatttttgcaatctctgacggctggaatctgatacctgcgattttaaaccagcgctgtgcaccctttgcatcatcacctgcaaatagaacaagtaacagcagcacaatcattacggcatagtatatccacacgaatttgagcagaaatgtgtaatctataagggaaagcactatcataatagtcagtcccattacaaagcctattatctgcttgctttgtacggagtgcttggcactgcctatcagcaggatgcctataatcgacaaagctattatgtatactactaattgaaagtgataattctttagtctgtactgtttgagcattttgttacttcctatctgttatctttgtaatcttaattctaatactaatgacatgatggtcaaaaggtattttgttaaaggttattaattgattttttgtcgcgcatgataatccggacctcataagcttcatcgtttatattcatatgtctttgtatcacgctttttatttcttttttaatctgtgccatattgtcagaagcagatattgtgttcctatcttctgcaagtgctattttaagccttttcttggcgtattctcctgttttggaaaatttatgcatcatacagcggcacctctcatatcgtcagaggaatgtattatctgaccggatatatgggcaaatacaggagcaagcctgcttttggcctcacggacaggtattcctctgttctggcaaatgataacacttttgtcataaggaatagtgccgataatcctggtagaaagaagtgctgtaatatcattatctgatatcatctgatgccttcttaccatatgcttgtcatatgcattaacaatgactgatatatcgtcaagatgtgcgctgtcgagcaggcttatgcatcgccttgcatcgtgtattgcagatacatgcggtgtggtaactactatcgcacggtctgcaggtgagactgaaaaccaaaagccactgtcgatacccgccggagaatctatcaaacaataatcaaagcttgctttaagctcctctataagtatcttgaagcgtgcctcatagctgcatagcgtatccatggaaggtgctgcaggaattacatatagattgggatactttttattgcgtatgattgcctgtctgatacggcaggagcggtttaagatgtcgaggatattgtaattgaccttgtcctctattcccattaccaggtccagattgcgaagtcccatgtctgtatccagcatgatgacttttttatctaactgtgaaagttcaactccgatattggaaataaccgtagtttttccaacaccgccttttcctgaagtgaaaactattgcttcactcacaaaaataaacctcctagtctgttctggcacttgagcctgatgcgtttacaccctcagccttgactgcgagtaaatcgtcaagtgactccagattataataatatgaaattatatttctggatgcagctgcagcattgtgtgagctgtatccatatgatatacgtgtagctattgtaatttcaggatcgcttgatggagcgtatcctacaaacagtgcatggtttggtcttgtctcaacctgctgtgctgttcctgtcttaccggacacctcaacgcctgtaaagccgccaaatacatcatgcaggtcttcgaccaccatacgcattccctgatggatggcatcccactggctttgagtaagtgtgcctgatatatcagttgattttgaatcatactgcttgactgttttgccgtctgcatccacaattttgttcatcagcttatagtcataaagctttccggaagcaactgctgtcacatatcttgaaagagaaatagtcgtaaagttgttattactctgtccgatggctgccataacaggatactgtgtggcaatggacggcgtcttttctactatctcaacacctgatttctggtccagtccgtatatagatgcatatttttgtatgtatttcataccgttttcatcgtcatatgaaccggtgtccttgcttgcaagcctgaagcctgttgtgtagaagaatacgttacatgaatcccttaaagcttcagatacattgtccataccatgcgctccgggataaatccagcattttggctgattgctgatttctgtaaatattccggtacaattaatctttgacgaggtatcaatgactccctcggcaagacctgcggtgcttgataccatcttgaaggtagatcccggtgcagtctgctcctgggttgcataattccatagtggattagacttgtcctctctgagagactggtagtaatcagcatctacagtgtttgcaagcttgttgttgtcatagcccggatagctgactaaagcctttagctgtcctgtctttacatcagttattacacaggagcctgtacatgggtcaagggcaagctgtgcaggtgttatctctatgttgtttattttgtccataagaaatgcatatggactgatggagccattggcaatgttgcttactgttgcatcgtcataatcgagtacaccctggtcaaaaagcagaaggcacagctgctgtccagtgaccgccccagaatttaccatatatttgtatataattttggcaaagtctttattgtcagtcatggcatctctgatatacgagcagagtgctgtgtaaatctcgcttgaatcagcatacttctggtccacatcaagctttgttatgtctatccactgctttgaaatgcagtatttgagataatcacgcggtgagagtgtgccagccttccatgaggcatatgtggaatcagaggtatctatctgtttgctcaacagcagtccatcatcgtttagcactgacataacacatgtaaaataatcaagtgtctgctccgacatggaagcagtgcctgaagtaccactttcaagctcgctgtcaatagtggataatgcattctgcagctgaccgctgaaggaattgtatatagcctgctcagttgctgatgcatctgatgcattgaaatgtgtcaggtcaactacattgttgttgatcagtgcaaagtaaacatcacttataggtatttcaccggattttattttggagtaaacaattccggctatctcctgctctaacagcttgtatgtggcttcctgcaacttgatgtcaatacttaagtagacatcatttccggaaacaggattctcctgacttattacctcgtttatcttaccgacattgtttacatagacctgtttttcaccgtttttgcctcgcagatagctctcatagtactgctccaagcctgacttacctaccatatcattttgtgtatatgagtcatcatcctttgacagctcattatactcgtcggtagatatcttgcctgtgtatcctatgagcgatgaaatatattcaggatagttgtacttgcggatggtatcctcttcaactgatatgccggtaagagtatctgaatgctcattgacatatgctactatcgaatcatttacatcctttgcaatagtagtggttttgtatttagtgaatcggttctgttttatggcatatctcatcactacaatatcataagtggcctgcgtatcatacttgctgcttatatcaaagcattcattctggtcagagcttagaaaatcaataatattctgggcgctggcatttgcctcgtcaaatccaagtgctttattgtattcgagcttatcatatttctttccgaacacatctgacagaaatctcttttttgaggtttcagatgtcaatgtaaagctgtatgtaccatcatcgtttaaaacaaccggaaaatcattatatatggagccaccattattttttatcacattgataatttcattaagctctttgtttaaaagacgattgtgctccttcgtagatgaatagctgccgttgtctgagatgactacagagtatgcaagctgattgtaagcaagcagctcaccatttacatcgtatatattgcctcttgatgcctctatggaaagcggctttttaatcagcattatgaagtttttctgataatctgcacctttaataatctgaagggtaaagactctttcggcaagcagggcaaacatgaaaataattactgctgctaatacaaaaagccttgagctgaaaaatttcttcagaaaatcttttatatcataaatcaaatttctttgctctccttttctcgtatgcttccagcttctggtttaacttaagaaataccagatacaaaagtatactgataaccattgtgtatacaaattcaggtatgataattgacttcagatagtacaaaaagctaaatctgccacgcagtaaaaacatgaaaaagtatactaccagattgtaaaacaaatcgctgcctcctatcagaagcataggaagctttatatcgtcaggatagaatcttttttggaataatccattgataaaaccgatatacatatatattaaagcatacagtcctatataatttccgcaaaatatgtcaataagcaggccgcaaaagaagcctacccacagtccttcctttttgccacgcataaagccaaaggatgatacggctataatcaacaggtttggtgagatattggcaaaggaaagagtcttaaacagcgtggtctgcaataaaaagcataaagttattattataaataaaacaattctacgtctcatgctgctccttacttattttcagttgaattttcagtctggctgtcaccggctgtttctgtactttcggtgtcgtcagctgtcttagtgtcaccggtctgcttaagctgtgttatgaccatgacattttcgatatgctcaaaatctacaaccggtgtgatagtgccggattttgtcagattgttggaattattttcgatttttgttacatagccaatcagtatgccctgctggtaacggtctgacacgtatgaggtaactacaggatcgccctcttttaccttgttgtcgtcatcctttaactctgtaaaggtaattaccttgtcctcgttcatggtttttatattgccactgacggtgaggttgtcctccgtggtggaaaccatgccactgaccttgctggcatcatctatgatacaacgtaccttggcaaaattatcaccagcatcggtaacaatacctacaagtccgcttcccgcaagcacattcatgcctacgtccactccatccttttttcctttgtcgatagtaaaggtagaaaaccagtttccgctgtcctttgctatgacactggcagcaaccttgggatatgatggatatttggcatccaaatcaagaagctgtctgtaattgtcaagctcatactgttcaagtttgttggttgtgagctgtgttgtaagctcttctacctcggccttgagctttttattctcagccttgacattttttaatgtgcgtatttctgtaaccttatctgaaatgtggattccaaagctgtttatacctttctgcattgggatgaatacatatccggcagcagtctttaaaggaccaccggagatatttaaggtaaggcttaacagcatggtcacaaagcagactgctgtcataatcaacagtgtgtatcttgcaggcagctttttattgtgctttctctttcgattgcgaaaattcttactcatgttaacctcggttattattttttgatgctgaacggaagtctcttatattttgaatcagaaactatttgtacgagtccgcgtactgcactctcctcaggacattctgagcagatgacctttatacctgtaatctgttcaaagagttggtcaagtcctgtaagctgtgagccgcctcctgtgatataaatgcctgaatggatgatatcctttgcaagctcaggcggagtcttctcaagaatcatttttattgatgtgcatatagactcaaggtttgacttcatagcctcgtaaacgacctttgaaccaatttccatctcaataggcaggccgcttaccacatcacgtcccactattaccatactgtcctctcttcccggaagtgcagagcctatagtctccttcaacagctttgcagtcttttgtccgattacaagattgaactcctttcgcacaaaggagataattgactcgtcaagtctgttgccaccgaaatgaagcaggtcactaagcaccaggccaccgagtgaaataacggatgtctctgttgtgtcagcgcccatatctactatcatgacaccggttggctcgtttacatctattccaagacctacagcatcagcgataggcttctcacagagcatgacctttttaggctttgatttgctcttatagaagagctcgtagaatgctcttttctctacatctgtgatatctgtcggcacagcgatgatgaactcggcatttttgatacgtgcctttgtcttgtgctccaaaaagtcaaaaatcatagtctgaagcagattatagtcagcaataactccctctacaacaggaaatatgacgttgattgtctcaggcgccttttcatacatggcatatgcactgtctccatatgcatatatctgatttttgtctattacggctattgtgtttttctcaagcattgtcttgcctgtagcctttgagtataccttgaaattgtttgttcccagatcaattccgtaaacgttgttgctcataataattctacctcgtcttctgtttatataagtttattttcatagaagctataatattcgttatctccgattatgatatggtcacaaagctctatggaaaaaatccctgagccctcaattaatctgtctgtgacagcaatatcatttctgctgggagtacaatctccgcttggatgattgtgcaataaaacaagttttgatgcatttttgtccagggcggtcctgatgatggagcctatgtccactacagatgagcttagtgaacccttggatatgaacttgtctcctaagaatctgcttttaacatcaaaataggcacaaatgacgacttcatttgtgagatgcctcatctgctccatgtagtagtcagctattgtctgaggattattcattctgatgctttgaaccttttttgtctttgctatgcgaagcgacagctctgctatcgccttaagctgtatagcttttatctgccctatcccggggatactaagaagctcatcataggacatctcatagagattgagcagattgccatgcctgccggaaagtatgtcctgcgcaatatcaatcacagtcttgtcccttgtgccggtctttataatgatggcaagtaaatcagcgtctgacaggcctgatgctccaagcgataaaaatttctcatatggtcgctctgaagccggcagatttttaattgttttgttattatgcattaattcctttcgcttctcccaggcgattgacaacggatttaagcaaagttttcagttaattgtagcacacctaatccagcttaacaagatttctctcataaagtttttgtaaagacatcaaaattccaagctttgcatggtaccatgtgagtcctccctggaaataaaccgcatatggcggcttcacagggccatcggcagaaagctcaatggatgagccctgcacaaatgcgcctgctgccatgatgacatcactgtcatagcccggcatagcccatggctcaggggtcacatagctgtctacaggtgctgctgcctgaatgccctcgcagaaggctatcatggcatcgcggttattgaactctacagcctgtatgatatcgtggcggctttcagtaccgtcaggaaccaccttaaaaccaagcttttcatagatttttgcggcaaagattgctccctttaatgctccgcttacgacagtcggtgcaaggaaaaagccctgataaaatgactggatgactccgagtgaggctccaacctccttgccaagtcccggagatgtgagacggtatgcggcattttcaacacattcctttttgccgacaatatagcctccgattggtgcaagtccgcctcccggatttttgatcagtgagccaaccatcatgtctgctccaacctggataggctctgtatcctcgacaaactcaccgtagcagttatcgaccatacagatcacatcaggctttatgctctttacaaaggcaatgagctcgcctattcttttgaccgaaagtgtaggtcttgtagcatagcccttagagcgctggattgtgacaagcttcgttttttcgttgatggctttctttattccgtcatagtcaaactcaccgtcaggcagtaaatcaacctgcgcatatgtgatgccatactcagcaagtgagccctttgaagggcgtatgcctattacctcttcaagtgtatcgtaaggctttccgacagggcttaaaagctcatcgcccggacgcaggtttgacatgagtgcaagtgcaagtgcatgtgtaccacaggtaatctgaggccttacaagtgcatcttctgcgccaaaacagtctgcgtacactctctcaagtgtatcccttccgaggtcattgtagccgtagccgcttgatgcctggaagcactctgcactcaccttgtttttctgcatggcggctatgaccttaagctgattatactcagcattggtgtctattttttcaaaacgctccttaagctccttttctacagaggttccgaaatccaaaacctcctttgatattccaagtgtctcatactgcctgtaaatggcttcattggtatctaacaaattataatcctcttttctgctaaaatttcttgtattttatttaatattttattatcatcatatgaatattcatttttttctatccatatggtatctttttctctcctaaaccaggttagctgtctctttgcaaaacgccttgactcaagctttaccttgtccacagcctcatcaagtgaatattctccatcgagatatgcaaggatttccttatatcctatgcccttcatggataccatatcgcttgtacagcccattgcctttagctttttcacctcatcgacaagtccgtttgaaaccatgatatcaactctcttatctatcctctcatagagtctttgtcttacatcatccagtacaaaataggcaaaactgtatggagactgcttggctctttcagtctcattgtgctttgaaatcggttcatggcaggtgtgatagtattcaattgccctgatgacgcgctttacgttattctcatggatgctctcgtaggatgcagggtcgatatccttaagcttttcatgcagtgcatggtttccgtgctcgttggcaaagtcgtaaaggctctttctgtacgactcatccacatcctgctttgtgaaatcaatgtcatacaaaagcgcctgtatataaaagccggtgccgccgacaactatcggtatctttcctgcttcgtatatttcattaagtgcttttttggccatatccttaaagataaatacattgaactcgtcagagggctcaagttcatctatcagatagtgctttatgccgtccatctcatcgactgtaaccttcgcagagcctatatccatgtatttgtatacctgcatggaatccgcggatattatagcaccatttattttttttgcaagctcaatcgatagagctgtctttcctactgctgtcggtcctgtcaggacaatcatcggtttttgtgtcatattgcacctcagtccaaatgtgtatgttgtcatacgatacgtttgaatttcttttctatctcatatttgctcatagagataatggttggtctgccgtgtgggcagttgtaaggattgtcgagtgacaaaagatcatctatcagcttatttatctcaggaagagtaagcttgtcattgcccttgactgctgccttgcacgacatggatgcgaccttttccgtgatgatatcaggagtctgtctgcctgtcgaattggaaaaatcatcgagcatctctataaacagatccttcatatctatgttaaacaaattatccggaattgcactgatcatgtattccttgccgccaaaatgctccacctcatagccaaactgctctatctgcggcctgtatttctcaagcatctcgctttcccttgcatcaagagtcatgacaatcggagggcttatgcgctgtgatgtgaaatccttattggcaagtcttgccattgttttttcatacagtaccttttcatgggctgcatgctggtctatgatgtacagcttgtcctcaaattctattaaccagtatgtcttaaagagctggcctatgatggaaaactgcttctttgagctttctgtaagaaaaaccttgtcgtaatcgccgagtgtctgctgggtgccggtgacaacctgtgcaggttcatacgcggtagaagtctcaggcgttagttccactgaattgccggtatgtacaacaggcgtcgatgcagatgttttagctttctgttggtttaaagtattttctgtgagaggctcattaacagcaggtccttttacagtggagctttttacagtagctgtcacgctctgtccgtacacgctccttgattccgctgccctcacttcattgatacgcctcttctcaaacggctccggtattggctccttatactcatgcactatctttttaggcgccggcgtactgtctacaggcacctcgggaatcatctccttgtgggatagaattgcatatattgtgtcacacaattcgacatatatctcgttgttgttgtcgaacctaagctccatcttggtcggatgcacgttgacatccagctcactgaaaaatgtaaagtaaagcactgtaaacggatactggtgctgcattagaaagctcttgtaggcctcctcgatagcgcgtgacaatatattgctctttacatacctgccgtttatgaaataattctcataatttctgttgcccctcgtgatgacaggctttcctataaagccctccaccttaaagtattcgcattcatgcttcacctcaagcagtgatgatgatatctcgcgtccgaatatatggtatatgatatcctttctgttgccgtttcctgaggtgtgaagctttgtctggttattgtttatgaacttaaacgatatatcaggatgcgaaagcgcaagcttttcaaccatatcgcttatgtagctgccctctgtctgtgctgtctttaaaaacttgcgtcttgccggaacattataaaacaaatcctttactatgaaggtagtaccgtccggagcaccgatttcctcgttggaaagctccttcgagccttcaatcacatatctggtgccggtgagctcatcgtatgtctttgtgataagctcaacgcgggcaacggccgagatgcttgacagtgcctcacctctgaagccgagtgactttactgtgagtaaatcctctgccgagcggattttgctcgtgctgtggcggtaaaatgcaactgcaacctggtctctttcaattccgcagccgttgtcggtgatacggatgaatgagattccaccatcctttatctccacagtaatggctgtggagcctgcatctatggcattttccaccagctctttaaccacggagcacggacgctcaacaacctctcctgcagctattttatctattgtttcctgatttaatatggcaatatttggcattttaatcctttctaccagcggtttttaaccttgttctggagctgatacagcttgtttaacgcatcaagtggtgtcatgttgcctatgtctatgcttcgaagctcatcaattatgtcatcatccttcactgtgtcgaaaagtgaaatctgtgtcatatcaacctcgtcaagatgctcctttttatgcttgtgaccagtgtcaacggatatgctttttacagtatctgtgatatcatttgcaacaagctgctctgcgatttccttggcacgctctatgactgaatccggcagacctgcaagctttgcaacctgtataccatagcttctgtcagctccgccctttacgatttttcttaagaaaactatatcatcgcccttttcctttacagcgatgcaatagttatttacactgtcaagcttgccctcaagctcggtgagctcgtgataatgggttgcaaaaagcgtctttgctccgaggagctttggattacttatatgctctacaactgcccaggcgatgcttagtccgtcaaatgtactcgtgcctcgcccaatctcatcgagaatgagcagggatttggcggtcgcattccttagtatatttgccacctcgttcatctcaaccataaatgtactctggccgcttgcaaggtcgtcagatgcgccgactcgcgtgaagatacggtctacaataccgatatttgcagtttgtgcaggtacaaagcttccaatctgtgccatgagaacgataagtgctgtctgtctcatgtaggtggatttaccggccatgtttggccctgtgatgattgagattctgtttttgtgctgatccagatatgtatcgttttctataaacatgtcatttgtaatcattttttcaactacaggatgacgtccgttttttatgtctattattccgctttcatttatctttggcttgcagtaattattctggctggcaacaagcgcaagcgaagcaaaaacatcaatctgtgctatagctctggctgttttctgaatccttgaaacattgcaggaaatctgttttcttacatcacgaaacagctcatactcaagtgatgtgagcctgtcttcagctccaagaatggtatcctcaagctctttaagctccggtgtgatgtagcgctcggcattggtgagtgtctgctttctcacgtaataatccggaaccatatccttgaaggagtttgtgacctcaaggtaatatccaaataccttgttatacttgattcttaagtttttgatgcctgttttttcacgctcaccggcttcgagctctgcaagccatgtctttcccttggtttttgcgtctcgaagacggtcaacctcctcgttgtagccagcttttatgatatctccgtcgcgctgtgagataggaggctcatcctcaatggatgaaagtaaaagctcatatatatccttaagctcgtcgaactcttcattaatctcatcggtaagctcacacggtatgtctgaaagctgctgctttattggtggaagcatttttaaagaatccctgaaggcaataaggtcacgcggattggctgactggtatgtgattcttgtgatgagacgctcaaggtcataaataggattaaggtattccctgatctcatctcttgtgatttcgtttgcattaagggcttcgataagcttctggcgctttattatctctgccttttcgataagaggctgctcaacataggtgcgaagcagtcttgctcccatagccgtgcgtgtcttgtcgagtacccaaagcagtgagcctctcttttgcttttcacgaagtgtatctacaagctccaaattacgtcttgatgagctgtctattatcatatatttgcctattgagtacggatgaagctcaagtatattgtcgagcgagttcatctgcgtctcataaaggtactttaacagggcgccggcagctatgactccactctcataatcctcaagccccagagcctttattgtctgtacatggaaatgtgaaagcagtgtctcatttgcaagaccatcagaaaaataccatgagtcgagtgctgaaacagtaattgacagcctgtttttcatatcgtcaacatctattccgctcatgtagaaggcctcgttgcatatgatttccgatggattaaatctgctcacctcatctaacagctttctttccgtatccacctctgtcgtaaaaaaatcacctgttgtgacatcacaggttgctatgccgtatttgtcttcagtgtatacaatcgacattatgtaattgttttttgcctcatctaaagaagccatatcagtgtttgtgcccggtgtcacaacacggattacctctcgctttacgattccctttgcctgctttggatcttccatctgttcacagatagctaccttgtgaccgtttgatacgagtctgttgatatatgagtctgccgcatgaaacggtactccacacataggagctctttcttcaagtccacagtttttgcctgtgagtgtaagctcaagctcctttgaaaccattatcgcatcgtcaaaaaacatctcatagaagtctcctaagcgataaaataaaatacaatccttatattgttcttttgtctgcagataatgctgcatcattggtgatacttctgccacgaatatttcctctctttatgtgtataaatattattcatgtgtataaatattatttaaaatccggcctatattttttaataattgcttctgcgacctttatgccgtcgattgccgcagatgtaatgcctcctgcatagcctgcgccctctccgcaagggtatacacccgagatgttgctctcaaaggattcatctctttttatgcgaagcggagaagatgtgcgtgtctccataccggacaaaattgcatcttttctgtcaaagccatgtatcagatgaccaaaatgttccattccaagcttgaacgactgctccatgtcagcgctcatcagtccattcagctttgcaaagacggtgtttccctttgtacaggagtcaaaatcaccgtatgctgttgttaatctgtcattacagaaatcaccgaaaagctgctgtggtatcaaaccattgcctcgcttataattttctgtttcaagcttttcctgatatctcactccggcgagagcatcatctgctccgaaatccttcggcgaaacagatactatgatggcactgttcgcatttttgctgtttctgtcgtgatagctcatgccgttaaccaccgtgcgattttcggttgacgatgagttgaccacatatcctcccggacacatgcagaatgaatagactcctctgccattcggaaaattggatgtgaccttgtaagggcttggaggaagtatgattttcttttgaataccatactgtgattcatctatcatgcgctgcggatgctccacgcgaaagccgactgcaaagctcttgcattccatatcaaagcctttgttgtaaagcatatcaaatgtatctctggcgctgtgtccgagtgccagaacgcatacatctgtctttatctcactattactgttactgtcagaatccgtgtaaacacttaatagcttttgggaaactatatcaagattgtttacacaggtatcaaatacaaatgcagcacctttgtcaaccaaaaactcacgcatattgacaattacttctgaaagtacatcagtaccaatatgtggcttgttgtcataaagtatggacggatctgccccaaatcgcacaaatgtctcaagcacaagacgatttctgcccgaaggatcctttacggatgtattcagcttgccgtctgaaaaggttccggcaccgccctcaccaaactgtacattgcttttgggattaagtatgccgctatcccagaatttttgtacatcgcaggttcttttctcaacccggctgccacgctcgataactatcgggcgaaaacctgcctctgccagtatatatgcacaaaacaagccggcaggtcctgcccctgcaataacaggtcgcctgtcaagcggtatatggccgcatgcaggtatcatgtactctttttctttatatatgagcacagatgagctggctgctctttttacaattgcttcttcgctattttttgtatcctctatctctacagcaactgaatatgtatagaacagctcaggctttttacgcgcgtcaagtgatttctttaatatgcggtatgtaaagcctgtcttggcattgagcttaagcatttttattattttcttttttaatgcctcatcactgtgcgtgacggggagctttatctggttaattttaatcatttactgcatttctcctgctatatatccacttgtccatgcccactgcagattgtagccaccgcatatgccgtccacatcaagcagctcgccgcaaaagtaaagccccggatggattttggactccaatgtacgtacatctatttcctttgtatatatgccgcctgcacacacctgtgcaaattcggctcctcttggcttttttaccgaaacggctgtatgctttattgagcgggtgagacttttacaatcatcatctgtcaacagccttccctttttgtcaggagatacacctgatttgtgtatcagctcaagaagaagcttattgtttaaaagtccgttaagcatctcatttaacgagcggttgtctgtcgttgtaatgcttctgtcctttatgtacccattaagctcatcatcactaaaagccggcaaaaagtcaattatcacctcgaccctttgacctttatcgaggcctcttgacataagacttgaaatctgaaaaaccgggatgcctgagatgccatagtcagctaactgcagttcccctgtattttgctctgtcatttggccgtctatcacggaagcgacagtggcatcgcacctgacacctgtgatttttttgaaattaagaccatcacagctaaagccgcaaagcgcgggtaatggcttttggatatgatgtccgagagcttctatctgtcgaaacaggcttccgtcacttccaagctttggagaagccgtaaggccacacgctatgataagccttttggacttaaagctgcccttgtctgtttggatgcagtaaccggtccggtcatctgtcttcttattagttgccggattagcagcagaatttgtgtcctcagccgtaatccctgcagccttgatttctgtaatacttatgcctgttttcacatccacatgaagcctcataagctccatgcgaaaggctgccacaacagatgctgcctgccttgaatttggataaacgtagcctgcattgtcatatgcaggtattccaagttctttaaaaaaacgtattgtgtctgcataattaaattgcgacaacccgtttttaatcagcgctttactgccgtgaaacttatttacagacatatcagtgtttgtgaaattacatctgccgtttcctgttgcaagtattttctttcctatatcatccttgtgctctaaaagtgccacgcgtgctccctttgatgcagcagttgctgccgccatcagtccggatgcaccggcacctattataattacatcgtacatattctttcccctaactgatttattttaacattaacttgaatagctttcaagaaaatcgtacaaatcagtttcgttaaaaaagtagagtccgtttgtaaccttattttttgcttcatcgggcagttcttcaaaatacacgcctgtgtcaaagtatttttcacttgcagtggcgttgtatacagacagcattccggagtcatttttgatgcagtattttgcattcttagcctcatttgatgtcagaaggctttctttttcatttttttcttctttatcattttcattgctttgtgcaattatcgcagccttgtctgcagctctttgcgtattgattttttctatcataacaagtgcaagaagaattacaacaatagttaaaaaacagatactgattttgcttttcatattatcacctcaaaatcagtatctgtaaatttttgttatttattcaattttataataaatgacatttttttgccacttttatgataagtgtgccctttggaaaatgtctaagctcatcctcagtcagtcccttgagtaaaagcagcgccactgcatatgagataaccgcaatgattgcagcaagaatgaaggcgataatctcaatatgacaggccttgtaaagtataaagtatactatatacgaaataactcccattatgagcgagctgatggcaggtatgataaaggtcttttttatttcctgcttaaagccgctgtacttctttaaagccatgctgttcataaagcacatgagcaatgcaaaaaacgtattggcaagcacaactgcatgtatattgagcctgaatatgagcataagcagtatgagcactatgacatgtgctacaatggatatcgcagcgttgattaccggaaccttgagcctgtcaattccctgcaacagtccgttggacagagtggaaagcgagtaaaatactaccgcaaccgcaccgacatacatcataagtgatgcctcagcatttgttgcacgggtgcttgagaacagtatattaaatattggcagtccaaacacggcaagccctactgcacatgggaatgcgacaaccatgataaagcgtgtggaaagattaatctgtcctctcactgcctccatatcgtccctgtgatatgcgcctgtaagcaccggaacaaaggatgctgccatagctgatgctatggatatgggcacattgattaaaagcttgtactttccggtgtatacaccccaccatacatctatatcattctgagtgtatccctgaagcagcgcaacctgcttgaatataccctggtcgataataccactgatattgtatatagtagtacttaaaaggaccggaataaccgtaattacaagaatcttcattgtgtagccaaatgagctcaccctgacatttcgttctcttttcatctgtctcttgaacaccttcatatagatggcaaagataaatactacaaataaaagagccgctacagagccaagcactgttccaagtgtaccaccggctgcaccataggcagcggcatagtgctccttgtcaccaagcactgcaccaatccttgtacctgtacggtatagcacatatgcagcccatacactgactatggcatttactatctgctctattatctgtgagacggcactcggcatcatagtacccagtccctggaaaaagcctctgatgacgccgagcactgcaactaccaaaagtcccggagccagtactcttaaagcaaaaatactgtatggtgtgttaagaagcgttgttgcaaaaaaattgccaccaaaaaacagtatgagtgccactgttgtgccactgatggttgcaaaaagcagagcacacttcagtatctgatacgtcgcagtccgcctcttttttgccatctgggctgaaaccatctttgatacggcaagcggtaagctgtatgatgatataatcagcatgacattatatatttcaaaggctgtggaataatagccgattccgatatcgcccaatatacgctgcataggtatgcgatatatgagtcctattattctgcttataatagatgctacggcaagtatggagccctgtactaaggcattacttgccccgttattttttttagacatttataaatcctctgtttcaattgataaccagcttaaatattagcgtgttatacctaaagcgtcaagtatttttctctggtgctcttccattatggcagcctcatcagcctccatgtggtcatatccgaacagatgaagcatgctgtgtgtaatcagaaaggcaaactctcttttttcgctgtgtccgtattctaaggcctgctcctttaccttgtcaacggatatgattatgtcacccagcatgacctctcctgtatcaggattgaaatcatcctcattctcatctgaaaggaaagaaaaatctccgggtgtttcatatgaaagcatcggaaaagataatacatctgtaggcctgtctatctgtctgtactccttattgatggcatgtatcccttcattgtctgtcagcgttaaattaacctccgcctcatacggaaagctctcatgctcaagtgaagcagaaacaacagcttctgcgaccttttcataatcaaaattaaaagtgcattctacttctttttcgataaaaaaactcatttaagcagctcctcctttgtaagatagtctcgtatttttaaaaagtgattcatggaaagccctgattcatcatacattcctgagcttgacagttcatttaatgtctggataataagtatctcgtgattccattcactgtctgccacatcgtttttgatatgatcaagccttactattaaagcatcgaccatatggatgagtgcggattcaggggtctgtgggtgtcttagcttgccatagtactcatagagtatattggtcagcttttcaggaaaatgcatggctaatgcctgttccactccttccatgacgcttttatgcttctgccactgccctatgcggtaataaaagcctcctgctgcacatagcgctgtgtccagtcctgcagcctttgcagcctttatggcaatcgtcgatacgaaattgccatgattgtattcagagaaattgttctttttaagctgctttacagcaggaaaatcctcctctattattgctataagcctgtcatttgtttcatcagtgctaagtggcttaaataccctggcacaaatgatgccgataagcgaaacaatcatgccgcttacagctccggcaataataacggaaacagaaaactcctttgttgacatataatagaatatgcccggtgtcacaatgctcatactgattgtgatcagatatatacatatctgaagcttgtcctcctttagcatctttgcaaggatagcacctgtgattacaagaagcagctcacatacgagctcaaagcagtcgccggatacagtgattgaaagcaatatacaaaaataagtaccgcttataaaagccagaaactcattgccaatcagacaaagcaatataggaaaaatcatcaccggcctgctgtacagtggcataaaaccgcttatgatacacactacagagcaaatgataaacgcaaacgtaaacctaagataatcagttcttgagttgttcgacagctgcagtgtgttccgctcgtactcaagctcgaataaaagcagcatataaaatatgatatctaaaaaacccatgcatatccactcatccggatatacatcaccaagcagacacagcacaaatgaaagagctaagattgatataaaaattgatattagtgatacaacccttctcaattgctcttcctctgctttcttgcagtctttgcagtctgcttattttcataatcatcatatgcctgaacgattttttgtacaagcggatgacgcacgacatccttgcttgtcagattgcatatgcctatatcatctatttttttaagcaccctaagtgccacatcaagccctgattttgctcccggtgcaagatccttttgtgtcgcatcacctgtcacgacaacctttgagccaaagccgattcgtgtaagaaacatcttcatctgtgcaggagttgtattctgtgcctcatcaagtatgataaatgcattgtcaagtgtacggcctctcatgtacgcaagaggagccacctcaataaggcccttttccatgttgcgctggaagctctcagctcccattatctgataaagagcatcgtacaacggtctcaaatatgggtcaatcttgctctgcagatctcccggcagaaagcctagcttctcgcctgcttcaatcgcagggcgtgtcagaataatacggcccacctgctcatttttaaaagctgttatagccattgccatggcaagataggtctttcctgttccggcaggacccatgccaaacacaatcatctttttcctgattgcatcgacatattccttctggcctatggtttttggctttacaggcttgccatttattgtgtgacaaatgatatccttgtcaatctcaacaatctcactgcctctatgctcctctaaaagtgcaagtgcatagtttacgttctgctctgtaatgatgttgcctctctcagccagcgcaatgagctgctcgaacacctcttttgccccatcaatattcccctgcgctccgataatctttaaggaatcatctcttaagacaagtgttacgtgcagtgtgcgctctattttcttggcgaatgcatcaaactgtccaaagacgtttggaatatattcgcccggtatttttatagatacttcatttaaactcattagctcatgtgcctttcaatcaaaatatttttcattataacataaaaataaaatttgtcataatttacctataattaattccctctgatatatcaattttcatggtatttttttctatgtatatactgcaccacgtgatatcgggatatttttcctcaagcttcttttcaaggaggctgtaatctgctctcttgtggctgcctattgttacattttcactctccataaaggagatgaccgactcatcatacgtgaaacggtttccttcaggcacaatgtgccagattcttgtgcagatgagtgcatgtatacaaaaaacgccggtaattgcagccgtaataatacgtattttatatagaaatgctcttattgcaaagtatccctgcctttttaccacgagaagccttgtatgcgtctttttcaggtgcggcttcattagaaaaatatcttctgtattgcagcaggcctcatattcctttggacttacatatttaaggttccatatttttatatggtttgccgtgcacagatttatgaagcgcctgatattacagcctgttagctttactgttgcataagctttaatactcatatataacaccctttaaatgaccggctattattattaaatcctttgtaaattccttgatttcaaggcggctgccggatatttttatggtactgtctgctgcccttacagttacggccttgtccgaaaatgacagaatacccttatggttttctatagtcaactcattataaccatatgctgttacaattggaagccctagcactatgtcctttggaagctcgaacgaatcagttactttttgcatcttcatatattaacatatgtttatttaggctgaattatgccgattatttgtggtacggctcattattgctgatgcgaaacgacctgtaaatctgctccagtaaaattacgcgcatgagctgatgggggaatgtcattttagaaaatgaaagcttataatcagcgcactttaatacatcatcggacagccctagagagcctcctattacaaaaacaagatgacttttgcctcctgtcataagcttatccatcttctgtgacagctcaaccgaatcaagctgttttccatctattgccagacaaaatacatatgcatcgtcttttatatttttaagaagcctctcaccttctttattttttacgatgtctatctctgtctgtgtggcctgttcgcttgtcttttcatcggaaacctcagtaatttcaagcttacagtaacggcttaggcgctttgagtactcagcaatcgcatctctgtaaaatttttctttaacttttcctacacataatattgtaattttcatcgtttcattataacatataactataattaaacaatatggaggccgtatgaaaatatacgttgatgaacaaaaacgatacgaggatacaaaagcaaccggacagtgcttcaccggagtcggtgcgatagggcttattgctattgtgctgcttgatacaggagttataaagcttgccgctttagactcggtaaacaagctcatggtttctatcgtaatggggcttgttttcttgatattttttatcataggaatgaagtcatttatggagctaaaggacatttcaaaaaaaattgaccggaataattccctcgaagaggaaatcatggaatacgtgaccgtcactcatagggacgagcttatgactttagcgtcatctggtgaaaaaggagatgcctgctcaggtgatttatactataaaagagctgagcttatcacatcagtcattactgaaaaatacagcctgcttgaggaaagcttcctcgatcatatggttgaagaaatttattctaaaatttatagtgatattgtcgaagaatagtgctataataataacaatttattttttatgaggtgaacaaaatgaaagaactgcaagatcgaattctcaaggatggccaggtaattggcacaaacatcttaaaggtcaacaaatttatcaaccatcaggtagatcctgtgcttatggagcacatcggtgaggatttcgcaaatcactttgccgataagggaatcacaaaggttgtcacaatagagagctcaggaattgctcctgcacttatggcagcagccaagatgaatgtaccgcttgttattttaaagaagcagccttcaaagacattacataatgatttatatcagacacaggttacttcatttacaacagagaagagctatgagcttacgctctcacgcgatgttatctcagaggatgacaatattcttttgattgatgatttcatggctgacggagaggctgctacaggtgccatcagacttcttcgcatggctcacgctacagttgccggtataggaatccttattgagaagtcattccagcctggcagaagaaagatcaacgagcagggctatgaggtttactcacttgcacgtatcaagtacatggatgagtatcagatagattttattgaagaaaattaaaataagatttaatatttaaaatcaatacatattatacacaaaatccactaccctatttacagatttatgagtctgtcaatgagtagtggatttttattattgttaaagtatatgttttatgttaaactgccggattatgctccgaaatcgaaaagtgaaagctggtttgactccggcagtgaaccaagcagtcccaaatctgacatgaggtctacggctgttcgcgatacatgagttctctccctgaaatcatcctttgagaggaatggtccgtcctttgccgcttccgaaatataaatagcggcattgtcgcctagtccgtcaatactgtttatggccggcatgagcttaccgtcaattatctggaaacggttagggtgagccctgtatatatcaagaggcatgaaatcaaagcctctggcatacatctcctgtacgatacgcatgtccttaaatacatcctgctccttgtttgacagcgtgtcttttcttttcttatagtccttcatgtagttttcgagtcggtcctttccctgacacataagctcatatgaaaagcctgtggcacggattgaaaagtatgctgcgtagtatgcaagaggatagaaaaccttacagtaggcgattctccatgccatcataacgtatgccgcagcatgggccttagggaacatgtacttgattttctcgcatgaccagatataccagtcaggcacaccgtgtgccttcatatcctccttccactgtggccactgagggcatttgcccttggcaataatgccctttcgcactttctccatgatgttgaaggcttcctcagattcaagccccatggaaatcagatatgtcataatatcatctctggtacagatacaggttgaaatggtagctgtgccttcctcgataagagtctgtgcattgccaagccatacgtcggtgccgtgtgataatccggcgatacgaatgaggtcagaaaactcctttggctttgtatcaaggagcatgcccatggcaaaatcggtaccaaactccggtatacctaaagctccaagcggacatccatcgatatcctcaggctctatgcccaaagcggaggtgttctgaaacagtgacatgacagctttgtcgtcaagcggaatctttgtcgggtcaacacctgtcagatcctgcagcatacgaatcatggtaggatcatcgtgtccaagtatatcgagctttaacaggttgtggtcgattgaatggtagtcaaaatgcgttgtcgtgatgtcaacggtcatatcattcgcaggatgctgtacaggagtaaaggtattaatctcctcacccatcggcagcacgactataccacccggatgctgtcccgtagtacgtcgaacaccaacgcagccctgcactatcctgtctatctcgcagtttcgctttctgacaccgcgctcctcataatagtttttaatgtatccaaatgcggtcttgtcagcaagtgtacctatggttccggctttaaaggtctggccctcaccgaaaataacctcggtatatttgtgtgcctttgactggtactcacctgagaagttaagatcgatatccggctccttgtttcccttgaaaccgaggaaagtctcaaatggaatatcaaagccctccttgcttaacggtctgccgcactttggacagagcttatccggcatatcacagccaccacggcctgaaaatgcctgtacctctggtgagtcaaaatcactgtatttgcagtgagtacacaaatagtgagcatgcagcggattaacctctgtgatacctgacatggttgcgacaaatgagcttcctacggagcctcgtgagccaaccaggtagccgtcctcatttgatttccacacaagcttctgtgcgatgatgtacattacggcatagccgtttgaaataatagagttaagctctctgtcaagacgctccttaactatcggcggcagcggatcaccgtacatcctgtttgccttgttatagcagatttcacgaagcataccgtcagagttttcaataactggcggacatttatcaggtctgaccggtgagatacgctcacacatgtctgctatcttattggtattggtgatgactacctcctcagcctttttgcttccgagatattcaaactcctttagcatttcctctgtggtccttaaataaagcggagcctgctcatctgcatccttaaagcccttaccggccatgataatacgacggtatatctcgtcctcgggatttaagaaatgtacgtcacaggttgcaacaaccagctttccaaattcctctccaagctttacgattcgcttatttatatcgataaggtcatcgtttgaagcaatatcggaatcctcgtcacgtaccataaatgcgttgttgccaagaggctgtatctccaggtaatcatagaaattcacaagtcttgtgatttcctcctgtggtcttccgtttaaaatggccctgtaaagctctcctgcctcacaggctgagcctattaaaagcccatcacgatacttgttaaactctgattttggtattcgtggtctcttattataatacttgatgtgtgacagtgagataagcctgtagagattggtacgcccctggtcacaggttgcaagaatgatggcatggtatgtaggcatcttccttatcatctcaacagatgattttgccagggcatttacctcatctaagcttgatatgcccctgtcctttagcttttctatgaatttgacaaatatctctgcggtacatgcggcatcatccaccgctctgtgatgatggtcaagcgagatgtttagagccttggccactgtatccagcttaaatctgtttagctgtggcagaagtactctcgcaagagccaccgtgtccacaattgtaggattacactccatgccaagcaacgcgcagtttcgctttataaagctcatatcaaagtcagcattgtgggcgaccatgatgcagtccttgcaaaactccataaactgtggcagtatgacatccactgttggcgatgtgataaccatgtcatcccttatcgaggtgagttcctcaatcctgaacggaataggtacctcagggtttataaatgtggaatagcggtctacaatctcgccaccgatgaccttcaccgcacctatttctatgattttattcttttccggagaaaagcctgttgtctctatatcaaataccacgtacttgtcatccagcgactgaccggctgcattctccacaatatcctttgtatcatcgaccagatatgcttccacaccgtaaatgaccttgaatttgtcatccacagtatggttagcatcagggaatgcctgcacatcaccgtggtctgtaatagcaatggccttgtgcccccagcgcatggcacacttcacaatatcctttacgtcagacacgccatccatgtcactcatcttggtgtgacagtgaagctcaacacgtttttcggcagcagtatcctccctctttgatgtaaaatcaggtatctttttaagtccgactattgagcttattgacaaatcactgtcatatttatctacagtcacaactccctttgccttaacaaagttgccaggggcaatatatgcaagaatatctgctacgtcatcatttctggcaaaaagcttgagcatgatagtgtctgtaaaatcagtgaccgcaaacataatgatggtcttttcgtttctgatttcgcgggattcaaccgtaagaatcttgccctttattgtaacctcaccgataggaccgtcaatcttttcaatagccatctcctcatcatcaaagcttcttccgtacacgatatcagggtcattgtcatatttgcgcctgaaatctcccttgcgctcgaacttcttctcaaatttcttttcaaatttcttctcaggctttttatcagtgcctgtctttgcttcattcttcttatctgaggctttaggaaaatctgatgtgccactcttttttgtatcagatgtattttcactgcctcctacgaacattgcaccgtcatcgacagccaccttagcttcttcatcaccgtcatcctttgccatggcaaatttagtgcgggcgacaatattttgcacctcctgctcaatctgcttgtcagcattctgacggtatttgctgatttttggtttttcgtactgcagattaacgataaaatccatcccacagcgctcgcagaacaccttctcaagaaattctatgaccgatttgcctctggtctttgcgattattgtctcctcaagtgtgactgtgacatgtgtatcgtcggtaaagctccactttgaggtgcgaagcagattgtacaaaagcacactgtgactgtttatttcgtcaagaatactgtcaaaatagacatcaaaaagagtcttcggtgtgtactgcgaagacaactcgtaagactctataatttttactgtaatatctttacttttaaatatctgtttttttatgctttcctccagcttccagatattttttttgaaaataaggcgttttgcttttacatatattttgtaaaaatctcttgcatggtttacggaaattctggtgacatcagcattctccagcagattctccatatccttgtccagcttaagtgtagggaaaacttccttaaatgtttttgtcaaaattattcaccccaatggtcaagctcatattttaatgcacccaaaagctcgctctcaggcacctttttaaatacctcaccgtgctttatgataaggccctcaccgattccgccggctacgccaagatctgcttcctttgcttcacccggtccgtttaccacacagcccatgacagcaacctttatgtcaaggtcatatcctgaaaccattgtctccacctgatttgcaagcccgataagatctatctgtgtgcggccgcaggtgggacatgaaacaacctctatgccatcctttctaagaccaagcgttcttaaaatgagcttggcagactttatttcctcgagagggcttccagtgagagatacacgtattgtatcacctatgccctggcttagtatcagtccgagtccgatagcagactttatattgccgcttattattgtgcctgcctctgtgatacccacatggagcggatgattggttttatctgaaataagctcatgtgctttaacacacatcatgacatctgatgatttgatgcttatgacaagattgtcataccccatatcctctatgagctttaccttgtccagagcgctctccacaagtccctctgctgtcacaccatgatatttctctaccaggtctttttcaagagagccactgtttacaccgacgcggataggaatatttttctcctttgctacatttaccacagcccttactctgtcagcgcttcctatattgccgggattaattcggatcttgtcggctccgttttcaatcgcagctattgcaagcttgtaatcaaagtgtatatccgcaacaagcggtatgctgatttgtttcttaatctccttaagtgcccttgcagcctccatcgtaggcacagcacatcggattatatcacagcctaagtctgtcagcgcgtttatctgcgcaactgtgtcagctacattctcagtctttgtatttgtcattgactgtatgagaatcgggtttcctccaccgattactttatttccgatttttactatttttgtctccatgtgtatatctccaatctgttataaaatcagactattagatttctgatatcattgaacatgacaacaaccatcagaagaagtaaaagcactatgccaacgagatgcacatagccctccttctcagggtctactctctttcttcttatggcttcaactatcaaaaatacaagtctgccaccatcaagtgccggcagtggcagcaggttcatcacaccgaggtttgcagaaatcagcacgccccagtttagcatatttaatatgccaagccatactccggacatagaaactgcctgctcataggtgtctcccatgttttttacaatgccgacaggtccgcttaagttatttacagaggcagccccggtacagagcattttaagcccctctattgtcgtatagatgttgtatttcacctcgtagcagctataaagcagcgcctttccaaagcctggctttgtacgctctcccgacacgttaaagccgtacagatacctctttgttgtctcgtcatatttaggcttcaatgtggtggtgtgctttttgccatccctaaggtatgtcacatcaactgtttcaccttcgtgaagcatcgagtagaggcttatctcgcggtaaaagtgtatattcgtattgttcagctttacaatctcatcaccggccttgataccggcctcctcagccgcataaccctcaataacacctgcaagcttcggactgtcatagcctacagagcagatgataatgagagcaaaaataaatgccatgataaaattaaaaaacggccctgcgaaaacaacgcttatgcgcgcccacactgatttgttgttgaacgccctgtcatcacctgagctttcatcctcaccctccatgatacaggctccgccaaacggaagcagctttatggagtatttggtctctccacgctgcactccaaaaagagtcggtccaagtccaagacaaaattcattgacctttatgccatttgctttagcaagccagaaatgtccgagctcgtgaaaaattactatgatgctgaataatatgattgcaataataatactaataatgttcaaaattaccaccttttactgatatagtcatatgcgcactgctctgtatcaagtatctcatccactgaaggattttcaataaatgatgcattctccatacatgcctcgattatatcgattatttccagatatttaatctttttattcaaaaacagtgccaccgctctctcgtttgcagcattgaaggccgtaggaatattgcctcctgcccttgcagccttcatggcgagagcaagccctttaaaggtatcaagatccggtgcctcaaaggtcagatccttaagcttaaagagatcaagtctatcacctgaaagagccggtctgcttggataatacagtgcatactgtataggtatacgcatatcaggagtaccaagctgtgctataactgctccatccgcatactcaacagccgaatgaatgacactctgaggatgcactacaacctgaatctgcgacaaatcgacgtcaaaaagccattttgcttcaatcacctcaagccctttattgaccatggttgatgaatcaatagtgattttttgacccattgaccagttaggatgctttagtgcgtcctccacccttataccttcaagctcagagagctttctgcctctgaacggacctccggatgctgtcagaagaatctttttaatcggattcattgaatttccctgcagtgactggaagatggcactgtgctcactgtccactggaagaatggacacaccatactccttcgcaagcggaataatgatatgacccgctgtaacgagagtctccttatttgcaagtgcaatggtcttttttgcctttattgcagcaattgtcgggcgtattccaagcataccgacaattgcggttacaactatgtcacatggctcaatggtggcacatttaattaaaccgtccatgccataaccaatctcgatgtctgtatccgcaaggcttgtgcgaagctttttggcatcgttttcatcacttacactgacaaactgtggcttaaattcccttgcctgtttctctataagggagagatttctgccacaggaaagtgccacaacctgcatatcgccatgctctcttatcacatcaagtgtctgtgttccgatagagccggttgaaccaagtattgatatttttttcatgataattcctcgatttatatttttctcagtggttctgaatagttaccttagctttttgtttcaatggttcttaaatgttactttttaacttaaaaagaagctagccagataataaatgattggtgctgtgataatcatgctgtcaaagcggtctaaaataccaccatgtccgggtatcagatgtccgtaatccttgatatcataattacgctttatggctgatgcacacaaatctccaaccattgaaataaggcctgcaacagcagctataacagcaagtatagcaatctctgtgccgtctatattcatatgatttctgaatataaagcagtataatgctgtaagaagcgcactgccgaggacaccacctactgcaccctctatagacttctttggtgaaagctttggtgccattttgtgctttccaatcagcactccgacgcagtaggcgcatgtatcacagccccatgagcataaaaataccaagaaggcaaggtaaagtccgttgttgagtgtacgtatctgatagacatatgaaagcattgttcctacataaaacataccaaaaaaggctgccatgagctgctttgcatcatatttcgggtatgacagcacatacacgaacatcagtacgataagaaagcccatgaaaagcatcattacatcaggtatgaagctccaccttaagttgatgtaaaataaaatcaaagcaatatacggtacaaccgataagagcgatttttcaaatttaaacaccctgaaaagctcaaacatacctatacacgaaatcagaagtgttgaaaaaagaagcacctcgtttcctgttactataagaaatatagcggcaattacaagaactataccactaagcagtcttgtcttaaacattatttatcctccgtgtcgttcgtttcttttaatccaccaaagcgacggtctcttttattatatgcatctatagcctttttgagttcatttttatcaaatgcaggccacggaacatctgtaaaataaaactcagcgtatgcaagctgccagagcaggtagtttgacaggcgctgctcaccacttgtgcggatgagtaaatcaggatccggaagctctcttgtgtcaagatatgatgagaaagtatctgcatctatatcgtcagccgaaagctttccatcatcatggtcagctatcatatgctttacagcacgtatcatctcatctcggcttccgtaattaattgcaattgtcaggttaagacctgtatttactgatgaaacttcttcaaggtttcttattttctcctgaaaattctctgaaagcctgcttatctcaccaattacgcgcacacgcatattgtttttattggcagtctttatgcagtttttaagatagctttcaagaagcttcattagtgcagcgacttcagactcagggcggttccagttttcagtggaaaaggcgtaaagtgtcagatatttaacgccgaggtcgtttgcagccttacatatattctcaacatttttggctcctactgtatgaccgtagtttcttggcatacccttacttttggcccagcggccgtttccgtccagaatgattgctatatgttccggagtactcatattttatttcctttcatttatgcatattatatatttacaatcatgacgcatcatttatttgctggtcacacagttaagtgtgaacagtaaaaccgggaataagcaaataagggacacgaataacatgtcccttgtttgtatacgtgatataaatactatacagtaagtatctctttacattttgcatcaaccgcagcgtcaacctttgcgacaaacttgtcggtaagcttttgagcgtcatcctcgaggcctttaatctcatcctctgaaatgccttcctctttgccggtcttcttgatgctgtcgattgcatcccttctgatattgcggacagcaaccttagcttcctcgccttttttcttgatgtcctttgcaagatctttacgtctctcctctgtaagctcagggaaaacaagtctgataagctttccgtcgtttgtaggattaattccgatgtcagagcagtttattgctttctcaatctccttaaccatagaagcctcccatggctgaatctgaatcattctaggctctggaacacttacattggctacactctgaattggtgaaggtgtgccgtaataatctacacgaagcttgtcaagaatatgtggattggctcttcctgcacggatgcctgcatactcttcctcgagattatttaatgttttttccattttatcctggaaagggtttaatcttgaatccatattatcctcctgatatgcattatatgcaatttactatacagtaacctttgtaccgttaaatttgcctgtaagagcatttacaatgctgttttcctcattgagtccgaatacatacataggcatcttgttctcaaggcacatgatagacgctgtgaggtcaactactgcgagcttcttctcaacaacctcttcgattgaaagctcatcatacttctttgcagcaggattggtctttggatcactgtcatatactccgtcaattgctttggcaaggtaaataccatctgcctcaatctcaattgcacgaagcactgtggctgtatctgttgagaaataaggatggcctgtaccacctgcaaagaaaacaaccatatcatgtgcgaaatacttgtttgctctgtccttagagaaaagctttgtcatgttgccgcactcaaacggagtaagaacagctgtcttcattccgacatatctgaaaatctcagatacataaatgcagttcataactgtagcaagtataccaatctggtcagcctttgtgcggtcgatggtctcactcgttctgcctctccagaagtttccaccaccgataacaatacctacctgtgtaccattatcaacaatctgtttaacctgttttgcaacctcaatgactgtagcctcatcaaagccgtggtgcttatcacctgcaagtgcttcaccacttaattttagtaatattctactcatatttatttaccctcgaaaagtccctgaacatcgatatcagcgtatgtctgagaacagaagccctcgataacggcaccgttgttaatctgtactgaacgtgacttgatattacccatgataactgcagaagtatctactacaacaggtccctgaacatcaatatcgccctttacagctcctgcgataactgctgaagatgctgagatattgccgatgataacagatcctgcacctatctttacagttcctgttgaaacaatttcaccctcaaccttagctacatcagcgaaaaactctgatgaatttgtgttgccgttgactgttcctgtaacaacaatcttgccgttacacattacatttccgttgatggttccctgaatatcaaatgatcctgatgactgtaaatctcctgtgagtacagtacttgctgtgatgactgatgtttcgtcctgtacatctcctgataaaacgttattgtttactggctgtgtatttactggctgtggtatatcattcatttgtggtatctgctcctctttttgtgtattgattgtatgctctgcaaaattttcacttggagttggtcttggtacagttgtctcctgtggctgctcctcgacatgctcaagtaatccgtcgagctttgaaagctctgatgcaacgtcaacattctctcctatagtatcaactacaagattgtcagctgtctgagcctttggctctacttctttctcaggtacatctccgggtacaagctcgtttacagcctgagaaaaatcatccttaaattctttgaataatcccatgaatatttcctccatttattatcttatccaacagtatctgatttgatatattgaactttatatgtattattatcaatcggcaatatttcggcaccctgcgcttttatgctttcaacaagcggctcaatagcctctgccgtggttgatctgtttgaatcatcatgtaataacacaactgaattgtcatatttggcaatacctgaggtgacattattgacaatatcatcgacactgcaattgtcggccgtatcaccagaattgacattccagtcaaagtatgtgatatgctttgaattgagtatctttacaagctcaaccatgtctacattactaatctggttcatgctgccaccgggaaaacgataaatatccggtgctattccagtcagattggtgatataatcggaaatctgtgtcaggtcatcggtaaatgcctctgttgattcataaattttactgtatgaattactgtaggaagccatcgcaatagtgtgtccgtcctgcactatgcgcttataaacatcatcatatttaccggaggtatctgctgtgacaaagaaggtagccttgacaccacagttggcaagggcatctaaaatggcaccggtgttatcaccgggaatacaatcaaaggtaagatatacctttcttgtatccctatcatgatacacattgtcttttgactcaagctgtttcacgacagcctgagtttttgcgccagagctttcttcatcagaagcgatgtcaccatcatcagactcagtaccggtaactgtgcttgatatagctgtatttaactgaagctcaagcttgtatattctcgaattcagtttgacaaccatgatgcccagtacaactatggcaagtatagatattgctatccatattgctatagtcataataatacctgtcttaatccggctcacacgtttgcgacgctcttgctgctgtctggctaattcattatcctttgagtccatatgcgtcccccgttatgattggttttgtttcctcttactattttaccatatttttatatcttgtaaagataaaaaaattccgcaaaagtttaaaagttaaacttttgcggaacagcattcgtttaatcagtataaagatacagtttagactccagccatctgggcagcaacctcagcagcgaaatcttcctgcttcttctccataccctcacctacctcgaaacgaaccatctcggtgattgtaagatccttagaaactgactcaagatattttgcaactgactgctttccatcctctgccttaacatatgtctggtcaaggagacaaatctcttttaactgcttagatacacgaccctcaactaaaccattgaacatcttctcagccacgatagactccttgtctgccattgcaagctcaccaagctttgccttagcagcatctgataagaagttccatacatagttcatgttgttcttgtgctcgttgaagttgttgatatcatcatcgctccaaagcttctcgttaatagccttgtcaattaacttattaagaataggctttggaagtgttgtagcatcatttaatgcactgtcaacagtgatctctctaagctttgcaagctcttcatcagagatatcgtttctgctgatgtactgtgggttcatagctgcaacctgcatagcaatatttgtgattgcttctttagctgcatcgtctgttgcaccatttgctgcaatgataacaccgattcttccaccaccatggatataagaagtaacaacatcacctgtaacctttgcaaatctacgaacagataacttctctccgattgtagctgtcttctctacaagaagctcgctaagtccgtttgtagcaagaagagcgtcgatatcctctccatttgcaccaccatttaagccagaagcaagtgctgtatctgctacagtctgaacaaactcctggaatgtctcgttctttgcaacgaaatctgtctcagagttaacctctgctacaactgcaacgtttccgtttacagcaacacgtgcgattccctcagcggcaattctgctctgcttcttttccatcttggctgcaccgctttttcttaatacctcaacagcggcatccatatcaccgtttgtctcagttaaagcctttttgcagtccatcatacctgcgcctgtcatttcacgcagttcttttaccatacctgctgtaatagccatttgattatcctccgatattaatctgttttattcctcaactgtctcgtcagaagcttcctcagcagtaacctcttcctcagctccctgctttgcctcgataacagcgtctgccatcttagatacgattaatttgacagctctgatagcatcatcgtttcctgggataacataatctaactcgtcaggatcacagtttgtatcagcaatacctataagagtgattccaagtgcctgagcctctttgatacagatacgctccttcttaggatctactacaaatattgcatcaggaattctcttcatatccttgattccaccaaggttcttctcgagcttctcccactccttcttgagtgcgataacttccttcttaggaagaacatcgaatgtgccatcctctgacattgtctcgatagctttaagtcttgcaatacggctctcgattgtgcggaagtttgtaagcattccacctaaccatctctcgtttacatagtacataccgcaacgctctgcctcagtcttgattgcatcctgagcctgcttctttgtacctacgaaaaggattgtaccaccctgagcagcgatatcagatacggcatcatatgcctcatcaacctttcctacagacttctgtaagtcgatgatgtagataccattacgctctgtgtagatgtaaggagccattttagggttccatcttcttgtctgatgtccaaaatgaacacctgcctcgagtaactgtttcattgaaattacgctcattttatttacctccgtttggttattaatcttccgtgtgtttccaattagatcagccaccggtaagcgttatccggcaccggcgatcatccgcacacgtgctttatagtatttaagcctttggaattataacataccaaaggcttatatgcaagtaaaaaatttatttctgtgtcagaatagtgattatatcatcatacgatgctccctgtgggataacgtgctcaccatctgctataaaatgatcagcacccttttgtcccatatatatacgaaattgttcagcatcatccaccagattgagagctttaagcttttctgcaatggtgcgacatgtatcctgacttgttactgaaattgtgtatgttgtaacagcatcctgtggctctacagtctcctgctttgcatccgctgccggctgcgttgcttcctgctgtgtatcttcctgtgctgtttggctgtcctgcatctgactatcctgttcagtttcggcttttggggaagaagcatctgagtttgcagcagaggagtcagttttttcactattatattcgtctgcgactgtcccggaaatattttttgcttcaaccataccgagtgtttttgatttttctattatttctgtatcagacatggactgcttattgccgtgaaaaccaatcatcataataattaccgcaaaaataatgcctaatccaagtccacgcaaatagtattttaatctcactttatttgccctctttatataaatctattataagctttacctcgccggtaccaagagacaaaagctttgctatctctacattgctcttgcccgatttataaagcttaaggatttcatgtgtgtgatttattacatcagcatttgcgctgctgcctgcgggcgtaccaaaagcagcatctgatgccttgactgatacagaggccgctgtacctgttgtagatgttgcacctgcctttgacgcaggggctgctgaagcaggctgtgttttaatgatacctgaaatatctatacctgtcatctgcttcatgtcaggctttgtatcctgctgcattgtgccagacttaggttctgccggcttttgcacggttacagacggtttttcagccctctttgcagagtctgcagaaagcggctcgaaagagcttctgagtcttgatgatgctttatctatatcgcctgaaagccgtgtaagctcatcatgcttgtcatttagcatactgtataaaaacattatttcattatgtgccttgtttatcgaatcaagcactgtatcagaatattcatttatcgccattattttggaatttgcttccttttcaagacttcgctttgtctcatcctgcttttgtgttatttcctcgtccaaggcatcgcttaagtcctttttggcggcagtcacttctttttcagttattatttttagttcctcagcactcatatcggctattttatccaaatctttatgtgaaagcttgtcatttaccataaagcttcctataaggaaaacaacacctatgatgatgagagttatttctaatgttgtcatataaacctctgccctcttatgcgtttgtaagtatattcatataagggcccatgaccttacgcattttaatcagtccctttgtgtgaagctgtgatactcttgattctgaaacctcgaggatattgcttatttctttaagggtaagatcctcataataatataattcaataaccctgcgctccttctcggtcagattgtcaagcgacttaacaagcattgttttcagctcttcctgtgtaacaatctcctccggctgtgcataatgtgaattatgtgcagcatccatgacaggctcaggtcctgactcatcaaattcatcgagagatacaacatttgttactttaagctgcgactgccagctgcaaagctcatcctccgagatagaaagctcctttgcgaggtctgcgtcatttgctgttttgccggtacgaagttcaatgttctttattgcctcgtctattttcctttgtctttgtctgactgttcttggaatccagtccattttcctgatctgatcaagtatggctccacggattctaaggcttgcatatgtctcaaacttgacatttttttcaagattaaacttgtctatggcatcaatgaggccaaatatcccatagcttactaggtcatcatattccacattatgcccaagatacatgctgaggcgtcctgccacaagcctgaccagctgtgcatattctattatgagctgttcccgtagcttgggagtgggattcttttgatattcctcccacagcttttccttttctatagctttcattatgccccctgtttaccagtatattattctgcagctagctaattggcttatcattgtcattatcattatcattatcaaagacttcggaatcatcagtctttgcttcggccgcttcagctttcttttgcctgtcttccattgccttaaatgcacagcttaagattactttaagtatcgctccgattatatagaatactacaagcacagttaaaagtcttgttgtaaagctcatcagatcaacgccctgccgcagggatataatactgcatactaagccggctaaaagcataacaagagatggtaataaattattcttcatgttaaatcaccttttgctcttttccgactgctttgatgatatagtcaccggtttcacagtcaagtataacagttcttccgtaattaagaccggtatcctgtgccttcagaggaattttcagctctgcaagcacgtgcctggccatatcggtattgcgatcgccaacatttccgattgtagaattgcctgacatctcaaacatcttagctccaccggcaatctttgcaaccattcgtctgggattcgcaccattttttatcatttgattataaagttccctaattcccgtatcgccaaacttggctatatttgtgttatttctgagtttggtgctgtcaggcagcatatagtgtacaagcccaccgatttttgaagccggatcataaagggtgagccctatgcatgaaccaagcccaagtgtggtcagagaatcaggggctttggcaaccttaaggtctgccattgatactttaatagtacttgccatatggattctcctaaatactaaaaactaattcctaaagccgataaaatattatcatatgaatccggatcaggcataaggataaagtatccgttcatcattatatcatcaccaaactcagtctctataaaaagtgcattgtcaccatattgtccaaactgaattgccggcacacttaatatggaagcggccatatctacagcaatatacggaatggaaggtagtattttgagatttgtcatagttgaaagcgctgacaaatatgcgcctgctattatgttgccaatctccttcatggcagataaatccatctcatcaaacggctcgttatagtcctgtggtctgcccatcagcttgtttaccagaaagtgtgctgccggaagcttcatgagaaacatcatactgccggagatatcgttggtaacctcaagaaatatacccactattgtctcttcctccggacatatggcatctccaagttttgtcgcatccattaacagaactcttggaacttccattttcatggtagtgccaagcatgccggcaatcgctgtcgtggcattgccggcacctatatttccgatttccttaaggacatccatatacatcgaattgacattatctaaagaaaattcactcattgtattcacccttttatttgttaaaacttatatagtgaggcttttatacctcactatacattgctgcaaatcagttagcgtccttatctgagactattgagcctatttcaaacagagaaatcagttcatctccgtttttacctataccgtttatgaacagttccttgcctgtagatgaagcatctatattaggcttatctatttcatcaaccacaagtgtgacaacttcacaaacttcatcgacaataagacctatctcacccttttcttcaagctttaggataattattctggttgatgatgtatatacatcatcgtccagtcccatttttatgcgggcactcattaccggaacgatatcaccacgcagatttatgatacccttaaagtacttctgtgcctttggcactcttgtaatcttctgcattctgacgatattatcaacatagccaatatcaattccgaatttttcttcgcctattttgactgaaatatattgctttgtttctttttcctgtatatcaaattcattttctggcatgtacttcccctccattacataagtgtatttacatcaagtatcaaagctacatcaccatctccaagtattgtcgctccgctgataagcttgttgccgtttatgtattttcctaaagacttgattacaatctcctgctgtccaatgagattgtcaaccacaagacctgcctgctgatctcccttttggacaattactacagtaagatgatccggctcctgctcctttggctcaatgtccagcatcttatcgaggcggatgattggaataacgcttccacgcaggtgaataacttccttagcctgtacatatttgatatccttcacaggaatatcctctatatttgagatagagccgagcgcaatggcatatatttcatcacggatctctaccatgagagcctgaatgattgcaagagtaagaggaagacgtacagtaaatgtagtacccttaccaagctcggttgaaaccgatacatcaccacccagctgttcaatgccggatttaacaacatcaagaccaactcctcgtccggagatatcggtaatctgttttgccattgaaaagcttggcataaaaaggaagttgatgatatccttctgagatagattttcagcctgttcagctgtgactatgccacgctcgatagccttgttctttacggcttcggtatcgattccgtttccatcatctccgacctttatgacaacattgttgccctcctggtatgcatttaagaaaatagtacctacctctggctttccacgctcaagtctgacctcattgctttcaagtccatgatcagcactgtttctaagcagatgctgcagaggatctccgatctgatccacaactgtacggtccagctcggtatcttcaccggttatgacaagattcatcttcttattcagagtacgagacagatctcttatcattctaggatatttctgtgtaacactttcaataggaaccattcgtaccttcatgacagactcatggagattggtcgtaattctttccagatattcaatctgttcatggaatgactggttattattgttttctccatcagatgagctcatggctacaagagagttctttgcaataataagctcagacacctgattcataagcatatttctgatttcttctgcaagctcaggttcatcaacctcaagtgactccataatacgcttttctgtagcacggtctacactgtttaatatattgacaatagaatctatgccaccgacaattgtatagtcctgattgacaagagatgaaagctttctctccagcactctctcgacctcctttatgacatcaggtgatgttctgtccatctgggcgatacgtctggcaacatcagcctgcttttccggaggcaaagcaccgagtatcatggcagcctgtgaagacgacagataagaaagaatcatggctattgtctgaggatgctcgtcctgtataaaattaagcagctgtgcaggctcagtctttctgacaaactcaaatggtctgacctgtaatgatgctgtaagcttggaaataactccctgagccttttcactgccaagagctttttcaaggagctccttggcatagccgatgccgccctcagcaatatactgctgcgcgagacacacctgataatattcatccaaaacagattctttatcctgtggagagacgcttctggtgtttgctatttcgagtgtcagactctctatctcatcttccttcaaatgctggaagatggctgaagccttttcaggtccaagtgtaattaaaagaatagcagctttttgtaaaccactgtaatcatctatcatatgtaactactcccaatcctcattaagccagttacgcaacagctgcgcagccgcttcgggattttcatcaacaaatttttctatcagaagacgtgtctccgtcttctcgttatatccaatatcctcaagaggctcattattctcagcagtctgttctaaaagagaatccacagacagctcctcctcttttggttcctcctcactgcttcttgtgctcttaaataccacaaagccaagcagtgcaaaaataaggacagtgattgcaatctgtaaaatatcactcaacgaacgcacgccagatgccttgtcaacaaactccggctgctcatatacaaggaatgaaatctgtgagatacctgttgcattctgcacggaagttacaagatcctggtctacatccgtcaccttgaccggatctgcatgctttgctttgtattcctcccagcttgtatccttgagctttccgttcttttcaagagtgctttcatcatataccttatacctggtggcaactacggtaattgaagatgaatcatacttgattgagcctccatcgtttttacttgtagtgattttttcatcatttaaatactttttgtcgttatctgtaattgacgactctgatggagtgccatcctgtgtagtgtatgtagtatcatcgctgtttgaatcagttccgggaaccgcagcctgaccattggttgcatccgactggtaattcgactcactgtccaaaagacctgtatcggtctgtccatcaggcagagtgtaatttttctgggctgtttcagtcttactgaaatctatgtccagattcatgccaacttcaatattcgagaaaatatttgagctctctaaggtctttttgacttcatttttcacctgctcctccagcttttgcttataagaaagctgtgatgtcgcaagacctgccgaggtatcggaatctccgcccgagtaaagtacattggcctttttgtcgatgatagtaatgccctttgtggtatcgtttccaagagctgttgcaacaagacgtgctattgcgtaggcctgatcatctgtaatcgaatccttaagtccaagagtgacagccgcagttgcctcctcttttgatttaagaatggtaccatccttgtcaggcatagtgatatcaacgcttgcttcatttacgtatgactgtttttccagatgatccttaagcttatcctccagatacacctgatactttttctgcttatcagcctcggttgttgagaagctgccgtctgtgacattgtctatcgagtacgcctgcgcagggatgccgttatcacccagtgccataatggcatttacctcatctgatttattgacaaaaaacacaagcttgctgtccacctcatagcttatattgttatcttcaagtactccctttattgtggaagcctctgatgcactctgtgcctcgaccagctcaacctgtgtaggtcttgatatgactacgccaagtattacaagagccactataaccacagctactatgcttatgagcacggagcgctgcttagtattgaattttttccaccatgcagttattttatccaaaatagcctttaaacgttctggcattttctattactccttatattgacatctgcataagttctttgtatgcgtcaattattttatccctgacagcaacagtgtactgcaatgccacagccgcctttgtttccgcaacaagcagatcatgtgtattatcagactcgccaagtgcaaatctcacttcctcctgctcagctgcattctgcagatcatttgtctcaccgatgcttcccatggcagcagaaagtacatcagaaaatgaatcagtcttgtcagttttcgtaagagaggtattattaaaaaaagatttaatatctcctgttgaaattccattaatgtttgaaatatccatcaaaaagctcctttatgtatgtatcagccggctatttgcctatttgtaagccattttgtgccattgacttgcttgcctcaaaggcagttgcattggcttcatatgcacgtgtggcatctatcagattggtcatctctgtgactgtattgacatttggataagagacataaccatctgcatcagcatcaggatttgatgggtcatactccttgataaaatcagtagaataatctgatgtcacgctgcttacctttacaccgtttccaacagcggccttctttgatgaagagtatatctgtgaaaaaggtgtgacatttttctcggaaaaagtcacaatctttctacggtacggtgtgccttcctttgtggacgtagtgtttacattggcaatattctgtgcaatgatatctgtcctgaagcgttcagccgtcatgccggacgcacttatattaaaagcttgaaataatcccatatcattaaacctccataattactacagcacgctcttcattcgtgaaaactgcgagcttatgctgcttgtaagtgcttcatacttaatctgctcagacgcaagctcgacattttcagtgtctatatccacgttattgccatccatcctgtatgaataattggaatggtctgtatatacattggccgtcagctttgaggtatcaagctcacttatttttttatcaagcgactgatgcttgcatctgccaagctcctgtgacagtaccccctcaaaatttaaatccttgcgcttgtagcccggggtatccacattcgatatattgtttgcaagtatagcttctctttggtagcttgcatcagccgctttggtcaatacattgacatagtcaaaggctgttgagtttatcataaatattcctccaatatactttttgcatattataaaaaatactacataagtaccctaatatatattataaagtaaaatcgacaaaatacaagatgtttttgttgttttttacattatattgtattattttgtcgacagactcactatatatatgccgaaaacatagaaaagacctatgttctttcaaacataagtccttaaaaatatacttaaatttatttacttgtttttattttggattctgtcaagctcatcaaagactacatcgtttactactttgatatatgttcctttcatgccggatgaacgtgattcgataacgcctgcactctcaaacttgcgaagggcatttacgattaccgagcgggtaatgcctactctgtcggctattctgctggcaacaagtataccctcattgccgtcaagctcatcaaagatgtgaagaatagcctcaagctcagaataagaaagtgtattgatagccgaacggacaatcgctacctttctcttttcctcttcattctcctcattcacggatctcatcatctcaagcccaaccactgtcgtgccatactctgtaagaatgatatcgtcaatgtcatactctctgtcacttctgtactcaaaaagagttccaagcctctcgccggctatatcaatcggtgtgataatagccttgtacattcttgtatcttcaccaaagccaagtgtctcgaggtttacattttcctttgttgaaagtatgccaagaagtctttcattgagttcagtgtcaatatagcctccaacctcatctactatcagttcatgaagctcatccacgcccttgcagatacttgagccaagcaccttgccctttttgctgattacaagtatgtctgagtcaagtacaccggtgagcacctgacatatatcattgaacacaacctttgatgaattgttgttgtgaagaagcttattaattttacgtgtcttatctaataattgtactcccattaattgttattcctctctttcgggctttttatctgttacgtagccgcactgctcatctgcgcaggcaatcttgtttccctttataatcatatatcctccacaacgagggcatttttctgcaactggtctgccccagctcataaaatcacactcagggttgtcaatacagccatagtattttcttcccttccttgttttcttaagcacaacatccttaccgcatttagggcaattgacgccgattttttcaagataaggcatagtgaatctgcagtcaggaaatcccggacatgccaaaaacttgccgtgaggtccgtattttataaccagattgcgtccgcactcagggcagatttcatctgtcacctcatcatgtattgtaaccttctcaagctcattttcagccttgtcgattgcatctttaagatcaggataaaaattctcaacaactgtcttccagttaaccttcccctctgctaccgcatctaaaagtgactccatattggctgtaaaatgctcatcgacaatagtaggaaatgattccttcataatagaattaacaacctctcctatctctgtcacatagagatttttactctccttggtaatatagcgtctggcaagtattgtagatattgttggagagtaggtactcggacgtcctattccaagctcttcaagcgtctttaccaaagaagcctcagtgtaatgtgccgggggctgggtaaaatgctgcttaggcaaaagctcctcaactgtaagaagcgattcttctgtcagaggatttttaagaacaggctgcttttctttctttgcatcgtctgcagcagtatatgcaagctcaaaaccatcaaataacagtcttgaggtagcaaagctgaatacataatctccgactgagagctttactgtagtagtctcgtactcagattttgccatacggcttgcagtaaaacgcttccagataagctgataaagcctgaactggtctctcgacagcgactccttaatctcagaaggcactctgtttatatcagttggcctgattgcctcatgggcatcctggatatttttgctgctcttctttgttccctcaccggtggaaagatatttgtctccatagctttttgaaataaaatcctttgccatggcctcagcctcatctgatacacgcacagaatcggtacgcaggtatgtgatgatacctaccgtaccctgtccctttatgtctactccctcatagagctgctgagctatacgcattgtctttgaaatcggaaaattcaaagcctttgaagcctcctgctgcaaagtactggtcgtaaaaggaagcggagctttattgctgcgctgtccttttttgatattttgcactttgcaatcctttccctttatttcgttaagcaccttatccatctcttcctttgaggaaatggctatcttattgtcgcccctgccgtatagctttgcagtgatcggcttcttctcaccctccacatcaaccgtggcatcaaggctccagtactcctcagggataaatgcattgatttcatcctccctgtcacagataatgcgaagtgcaacagactgcactcttcccgcactaagccctctcttaacctttgcccaaagcagcggactgattttgtaacctactatacgatccaaaactcgtctggcctgctgtgcgtccacaagatccatatctatttttcttggatgctttaatgattccttgacagcattcttcgtaatctcattaaagctgatacggctgacatccttgccctcaagtttaagtgcgtgaagcagatgccatgagatggcttctccctcacggtcgggatcggttgcgagatatatcttatcggccttcttagcctccttgcgaagcttagcgagtatttcaccctttccgcggattgtgatatattttggttcaaaatctccgtccacatctattccaaggctgctctttggcagatccctcacatgaccgtttgatgccattacctcatagttttttcccaagaatttctttatagtctttacttttgcaggcgactctacgataaccagatatttagccattataaactccttatatagtaatttggaattgtctccttaacaaatcctttttgtataagatcttctaacacttcaaatagttccgataattcatacggcactttttgagacaatgtcccgattgcgataggacaaaaatcgagtaaactatacaccaatgcttcttttttatcaagtatattttttctgaaatccatctgtgtgcactctgtaaacccagtcattgtaatgtctgagacaaattcatcaatattataaataatgcctgcgccctgctttatcaggctgttgcagccgtagcttaaggtgtcggtgatacgccccggaatgacatatacgtcctttccctgctccattgcaaaatcagccgtaatcagtgaaccgcttctcttttttgcctcaactataactactatatcggataacccggaaattattctgtttctcatcggaaaaaacatcttttgcgggtcggtgcccggcataagctcgctgattatgcctccggagagctttattttatcatacagaaagcggttctctttcggataacaggtgtctgctccggagccaagaactgcatatgtatttccaccagcctccagacaccccatatgggcatctctgtctattcctcttgccatgccgctgattatctgtatcccctgccttgaaagtgctgctgccagtacctttgccacctcgcagccatatgcgcttctgccccgtgctccgactatagcgacactttttcttgatttgtcgggaagagcgcctatgtaaaaaagactatacggcggattatgtatatttctaagcttgtccggataagcctcatcctccattgttacaaagccgatatccttctgctgaaataatatccactccttctctacgtcataggaagctcttgattcaaggattatttttctgtcatcatctgtgaaaaacaaaatatcaaaaagctcattctttggcataaaaaacagcttttctgccgttatactgcaatcatgcagaagctttttcttcgcattgcttatatctgtaaggcttgtaagccagtatttgaacttcatgatacagcacctccccagaacttctcattgatgcttctgtagcatatagcttcgttgagatgctttgtctttatgctttcacagccgtccagatcagctattgtacgcgcaaccttaagtatcttgtggtatgtgcgtgccgtcagtccaagcttgtcaaacatattttccatgtagcttttctctcgactgccgaggaaacagtatttttccagcttgtcagttgatatttttgaattatacgaaaagctctcacctttaaacctttctttttgaagctcgtggcagtgcataacacgctttcttatgtccgcagatgattcattggatgtagtactgtttatatcctcaaagctaagcggtgacgcctccacacatatgtcaattctgtctattataggctgtgagaccttatcaaaatatctgcgcagagtcggctctgagcagcggcacctttgcatatcgggataatagccgcagctgcatgggttcatcgcaccaaaaagcaggaaattagccggataagtcacgtttctgccggctcttgaaagcctgatgcagtgctcctcaagcggagccctgagcaggtccaacaagccgcccttaaactcagcgagctcatccaaaaacaaaacgccattgtgtgcaagcgatatctcgcccggattaattctcgttcctccgccgatcaatgcggcctgggtgacggaatagtgaggatttctgaatggtctgttgtctcttaaggagctgtcattgtccaaaagaccgcagatgctgtatatttttgacagctcaagcctctcattttcactaagaggaggcagaatggacggcatacgctctgctatcattgtcttgcctgcaccgggaggtccgacaagcagtatattgtgcataccacccgcagccacctcacatgctcttttaataaatttctgtccgttaacatcacaaaaatcggcgtatttttcatccatttgcagctcatgtgccatgccggttttctgacacgtaaatgctgtctcatcaaactgtgcaattacatcatttaaatggcttatcccaaatatttttgcaccgcagacgagtctgccttcattttcattctgctttggaataataaactttccaatgcctttgttgtactcatcaaatacaatcggcagaataccgctgaccggcaaaatttcaccgtttagatttagctcgcctgcaagtgtgcagtcctttatgctatcagcgtcaatcacccccatagctgttaaaatagcaacagctataggcagatcaaagcctgttccggtctttttaatatttgcaggcgatagatttactgtgatacgcttggcaggcaaaacaatgccaacgctgtgcagcgctgttttaacacgttcctttgcttctctcacctctgaggtaagatttccaaccatatcaaaaacaggcataccggttgaaatatcaacctccacctgtaccggaatcgcactgattccatccaaaacagccgttctgactgtactgtacatatatactcctattccaattggggtaaatgcatagacaaatgcacaaaagacatggctctatgataacatatttttgccttttgtaaacacctattcgagcagttttcgtaattttttcaaaccggccttttctattcttgaaacatatgacctcgaaatgctgagcgttttagcaatctgtctctgtgtcagctctttttcaccgtcaaggccaaagcgtttcgtaataatataatattctctgtccgataaaacgcttctcatattttgccttaaaatcttaagtgactcagatacctctatatccgataccacatcagattgtccattctcaatcacatccaccagatgaatctggtttccctccttgtcagtgcctataggttcaaatatggacacatcaccccggctctttttacagcttctaaagtgcatcagaatctcattttcgatgcatctgattgcaaaggttgcaaaacgatttccgtaatcagccttgaatgatgacactgcttttatcagtcctatagtgcctatggatataagctcctccatctcatcctcgcatactgcatatttttttgtaacatgtgccacaaggcgcatattgtgtaatataagctcatccttagcttctttatcattttgagccacttttttcagacattccgtctcacgttctaaactaagaggtgataaaaatgtattcacatagcaccctgtcattatttgcttataatatattatgttcaaatctgtattttgtgatataatctttgccatgaatagaaaaatagactacaaaatcaatgaaaatgatacagaaaaaacagtagaaggctttttgaaggagcatggctacacacatcaggtgcttgtcaggctgaagcagacagaccatggcatactaagaaacggtatatgggcctatacaaatgaaaggctgtgtaaggatgatttaatcacagtccaaattgtagaaaacgagtgctcggataatatagcacctgtaaatctgcctcttgatatagcatacgaggacgatgatatcatcgtaataaacaagccgtttgatatgcctgcccatccctccgccggaaaccatgacaacacgcttgcaaatgcgctcatgtactattatggcagtcagaataagccgtttgtatacagatgcataaacaggcttgacagagataccacagggcttacaattgtcgcaaagcatgcacttgcaggcgggatacttggcaacgctgtcgcaaagcgtgccatccaccggacatactacgccgtctgcagtgggtgtacacctgcatgcatgcgcatcagtgctccgattgcaagaaaggatgcttccaccatagagcggtgtgttgatttcaaacgcggtgaaaatgcagtaaccgactttatcagaatcaaatataacccggataataatttatcgcttgtcaagctaagacttcttaccggacgcactcaccagatacgcgtccatatgaagtatatcggttttccactgataggtgactttttatataatccggactatacatatatatccagacaagcactgcactcagggcgtcttgttttcacgcaccctgtcacaggacaaaaaatgaacctcatatctgatattccatcagacatgaagtccctgttctagttgatttattttatccttttcgtatgggatatgcccttttaaaacctctttttttatgtagctgtaagtatattcttctccctttacagagagcatgacaagcagatactcaagcattgcttttgtatcgggatgaatcatgtagtgatccacgcttttttcatagtattccagcgcacttttgtcggtgtacttttctttctgatagttttttgaggcgcttacacggtctataaacatctcgcagacataccttatgggcattttcatgccctccatttttgtatgtgttttatcgtcccccggctttgaaacagcatagtcaatccagtactccaggtgatgcttattgcgtcccttgtgatgaagccacgcagatgaatagcccctgtcggctctctccgcattattcgggctcatataccccttgtaatacctgcagccgacaagaaactcagtcggtgaatattttgacatgtcatgaagaagtccctgtttataaagtcctatcctaaagcacccctgcatgactaaaatcttgtgatgtgtaattgttataaaatgtcttattgctttcatatgtctatctgcctatgaggatgtataccgactgcggtgagacatctgcatactgctggttttcacacagcaccggagtgtcataaaacggttctttgagcgtagaatcgcagactgcataccatttcattcctttctttagcttaggaagagctaacttctccctggatgaataaaaattgtaagctacgtatacatagtctttattcacttcattgtaatccccacagtacatcacacctacacatagctttgtggcatcacactcgcctatccaggcattcttgcagtgataggacaaatcaggatacccaacagccttgtaatcgctgaatttaaacggctttggacaggaaataacaggatgctcatccctgaatttgataagtctggttaagaacctgatgttttcccttctgctatgctcatttgaccagttcacccagcctgtagggttgtcctgacagtaagcattgttgttgccatcctgtgaattacagatctcatcacctgccataatcataggcactccctgtgccaaaaacaaaagaagcatggcatccttccacttaagttttcttatctcacggataaacctctttcgtgaaggaccctcacaaccgtaattattgctgaaattccatgaaggaccatcagcatttttctcaccattggcctcattgtggcggtcattgtacatgaataaatcgctcagggtaaaaccgttattgcttgatatatagtttataaatccgacattctccccctgctttttctgctggtttaaaagctcatacatattgcagtttatatggtttaacatcatacgcgccgcaaactggtactcctccttgtcaatatagagattttcatatgtcctgttttgcggtacaaccgacatatcaaagccatcatagagtatctttgtccggctaaggagagcatcctgcacaatcgctgtaacaggcagcctgtccccaagcagcttaaaaccatctacatgaaagctcatgacccagtatctgagcgcatcaagtatcagattgtggtcagttctgtccggaaaatacatctctacgatacattccatgccatttttgtgcagcctttcaacgagacgcctaagctcattggaggcatctgaagcgtcactggcatatgatgcttttacggcaaaataattgctggaggtatagccccaaaaattgaccttgtcattttctgtatgcacactttgctcatcctttaaggaatacttcggctttgcatattccggaatatcgtgctttacagggattgtcatttcttcaaactcgtatacaggcatgagaagaattgaagtaaagcctaatttcttgatgtaatttattctgtccgatacagcctcaaaggtgcccttatgctttttgttccctgaaacatccatggaaaaacctctaacatgcagcttatacagcttcatccggtccctggttatctcaggaaagctgtcatatttccagtcaaaatcactactgtctatcccgcatgctatttcgtagtcattatcacttcttgttttatcattccatttttctctgccgaaaattcttgtggcataaggatctatgcacctttttccattaattctaaaataatatgcatactcattcccgcaaaaaccatgaagtctcacagagtaaagtgagccggtcgaatactcggcaggtatatcaatcacacaggcggtatttcccgatttatcaagtaaaacaatgctgcattcatcctctttttctgctgcaaaggtgaatactgcactatccccctcaatataagcacctgtttttaaaaagtttccctttgttaatcgaaaattcatgcaacaccatccaatcaataattctagtatttatttattatactagttttgactttttttgtatagaataatttgatataatataatagttactttagattactataaagaaagaggtacaatatggcagaaaaagcaacacctgttacacctgatgaggcagacgatatccgcgtaacacttgatctggacaacggaagtgtcgaatgcaagattatcaccatttttgatgcagatcacaaggattacatagctcttctaccgttagacaaaaatggcaacgagaatgagagtggagaagtgtatctgtatcgctatttcgaggacgaggaaggtattccgagaatagaaaacatcgaatccgacgacgagtacgaggctgctgccgacagattcgatgagcttttggatgacgaaatgtttgatgatatttaatcatctctactattattttgtctaggctctttactttcacggacaaacctggaggcttgggctgatttatcgtttaccgacttgaccgagtaaacagacaagcttgtctttgcacgggtcatgccgacataaaacagccttcgctcctcctctatgtccttttcaagcacagcctttttatacggcattatcccttcatttgcatcaattatatacacgttttcaaattcaagcccctttgagctgtgaagggttgcaagtgtcacggcattagggtcactttctttcgataaagccataagcttcatctgctttgtatattcccttatatgctcataccactcttcatatgtagcaaagcccttggctcctgactggatttcatccagtatatcaaacaaatcctctttatttatatttcgatactcggcatattcagctaaaaagtcgtcatagccaatccctcttctgatatagtttatgctggcatatggattcatccggcttataagcttcatgtcatactcaagcttttctatccgctcagctatccacggcttctcatcaaacagcttaatccactcatcaaatgccacagttgcatcacacaggctgtctcttgacagataccgctttggtctgttcataatctgcaaaaaatcagctctgtctctgctgcctcctgcaattctttggtatgtaaacaagtctctggcaatccagtgctcatatatattaggtatattatccttggttttgaatgggatattatagctcataagctgctctataagctgtcttggctgggtatttgtcctgaaaagcaccgcaaagtcgctgaatacagctcccgcctttatctttttatctatatcgcgtatgagaaagatattttcgtctcttctgttttcaaaatcagcaaacgtaacaggcgcctttgacttgcttgccgcaatgattttcttatcaaatctctccctgttgtgcgagatgagattcagcgaggcctccactatatatctgccacatctgtaattagtatctaaaaggattctttttgcattcggatagtccttctcaaacccaagcattatctcaggctttgaccctctgaagcggtatattgactggtcatcatctcctacaataaacagattattctgtggagcggcaagcatttttataatctcatactgcagacggttaatatcctgaaactcatcaatcagtatgtatttatacttgttctgccacaatgccagtatatcaggtctttccttaaacagctcataagtatacgagagcatatcatcaaaatcaataagcctgttttccttaagccttgtctcatattttttatatatatccctgaatatttcctcaccacacactccagagtagaaattttctatatcaatgcggctgtttttaatcagactgatttcagcaagtaaattgcctataaactcattctcatctttgtattcaaggcggtagtaggataaaatttccctgataaagccgtatctcacagactcatcagcaatattggcacttgtaaagcgatatgcatatttgagtattgtaaaaaagacagcatgaaaagtaccaaaagatacgttcaccctctcgtctttcatcagtgaattaaaacgctccttcatctcatttgcagcagccttggtaaaggtgataactaaaatctcagaaggcttcacatgatgctttgttattaaatttttagtcctgtgtgtgataactgcggtcttaccggaacccggtcctgctaaaacaagcatagcgccatccttgtgttcgatggcgccaagctgggctttgttaaaattcataaaataccctttgttaatagattagttattagaaagcttttctatgcctttcttaattctggctatagactcctctttgccaaacacctccataagctctgtagctccgcccggtgtcatctgcttgcctgaaacagcggtacggattggccacataacatagcctatcttatagcccttttctgtagcatatgccttaagagtctcaaaaagtgcatcatttgagaaatcatcacagctttcaagaataggaactacatcgtttaatacctcaagtgatgtctctgggtttgtcttcatcttcttgtgagtatacattgcaatatcataatccggaagctcttcaaagaaatcaatatgttccttgatatcagggaatatctcaatacgtgtctgaaccattcttgctatcttcttaaggtcataatcctttgtgacaacctccttaatgtatggcaatgccatctcatagaatttgtcaaaatcaagcttctttatatactctccgttcatccatttaagctttgtgaagtcgaatacagcaggtgatttgctcatatgatgataatcaaacttctcaacaagctcaggaagtgacataatctcctgattgtctgaagggctccagccaagaagcgctacaaagtttacaatagcctctgtaaggaatccctgatccagtaaatcttcaaaggatgagtgaccacatctctttgaaagcttatgatgctcctcatctgtgataagcggacagtgtacatatacaggtacatcccatccaaatgcctcataaagtctgttatacttaggggatgatgaaagatactcgtttcctctgactacatgtgtgatgcccatcaggtgatcatctactacgtttgcgaaattgtatgtaggatatccgtcagatttgataagaatcatatcatcaagctctgcattatctactgtgatatctccgtaaatctcatcctcgaatgtggttgtgccctctgtagggttgttctgtctgataacatatggcttgccggccgcgagatttgcctcaatctcctcctttgacaggtgcaagcagtgcttgtcatatatagagatttcctttcctgcaacagttgttttaagactgtcaagacgctccttgtcacagaagcagtaatatgcctctcccttgtcaataagttcctttgcatacttcatgtaaataccctgtgccacacgctcactctgcacatatggaccgcatccaccatccttgtcaggtccctcatcatggacaagtcctgtctcttcgagtgtcctgtttataatatcaacagcaccctccacctggcgtacctgatctgtatcctctatacggagaatgaaatcaccgccctcatgctttgcaatcagataagcatacagtgctgttcttaaatttcctacatgcattcttcctgtcgggcttggtgcaaatcttgttctaatcttactcattttaaaatgtgctcctctatattaatattttttagtcatttttcaatttgaaattatataacaatatggaaattttatcaatcctcagattgaacttccatatcaagctctgcgattttatttaaaattctgtttacctcgtggattctgtcaccaagctcgctcctgtgtgataaaatctctcgtcttagcctggttatagtctccacattgcaggacatcctgccccttaatttttgtctcctgactataagttcatgcttctgctcaaccatctccttgtgatccacaatagcgtttgtgtagttgagccatactctggcatcgtagaagtcatttttactaagcaccgaaacaagctttttgctgttgtattccagatcctcgtttgtccttctgaagcgctccttgtcttttacagcgagaagatactgctcatagttgtatacaaattcctttgaattcttcacatgatacttctcgtatgtgtagtcaacagcattttttatacttacatacttgatcttcactctgttttcaagagctactgctttatttttggatgctgcagcgctttttacttcatctgaatagctttgatatgtcaaaagcacaaacgagcctgcaaccgttgaaagaagtgccccgataagcataaagatagtggtatcggctccatatacaatctgcatcagcgtgcatacagctaccactacagcaaaaaataccactaaaagcactgcgtacaccctaaatgcccgctgtctgcttttggcatattcaccatctatatcgaactgcactttttctccctcgagatacctcaggtctttatttattacatccagactgctttcgtttttttcaagacgctttattgcccgcggaatctcatcctccagctgctgcatctgcgcatactggctgtctgatatgcggtttttggtctttaaaaaatcacttctggtcttttcgagtgtcaatatgtttgcagccgcatcattcatggtctttttatctgtctctgacatattttccatcctttctatgtcagtcagataatttgtgacaagtgcatactctgttctgttatcctcgagttctctggcggcatcaaccatctgttcacatatttcaactacattgaaccctttagtactctcatccggtatactctcaatatgtaattgtgtatcatcggtcttttttttgcgtttaaataacatgcgccctgtaatcctctttgtatttcaaaattgtttcttttggtctgccctcatcgcaaccatctgaagcttctgcatatacgccctttaatacgctgtccagattatttatttcctgctctgtaacactatattccctgacaatacgggcatatcctatgtcgttattatcaagcttataggcatatagacaagaccacagtgattttctgtccccattttgcctgaaagcctcaagatataaatccgctgctatatcaaacaaaaacagctgcacataggctgtagccagattatgatatatgtttccgtacaattcacgctcagtatgctttgcatcctcacatgacagcagctttttgtattcaaaaattgctgcagtgtactttttcttctccatcagtctgtctgccctgattttcaagcactcaaactcgctcttttcctcgagctccttaagtgcatcatgtgtgttcttaagctcctccttagtgcagtagccgctgtactcaagcagctcagtcacaaaagcagacagtctgccgtttgtggatataatggttctaagatgcatggcaagctttggcagatgtgcatggttttcaatccaggtgcacagctcaagactcataaagtcatcatccaaaagatatgtattgttgattatataataattaagctcctctatcgagtaaacatttatagacacaccctctatgtaatagggcatggctgctatagcttcattacacagtaataattctcccatatgccctcctacatagtcatctcatagtgccagactttgcccgagctcataaatatttcgccaaagcctaaatccttaatctctatatctatcctgtcatcagatacaggtgtcgccgtaattctgatgcgtgtagccctatccggcctgggcggcatatccgtaagtcttagtgtctcaatctttgcctccctgcttttaggaagctgcttccagaaatccacctcataagagcctgaaattataacctcacactgccccttggattcaaaccagttgcttccggcactgataagattataaaacgacagttctcccttatcatgtaccttaaggctcagattgaacttcatctcattctcgcccatatatacaaaaggccattctgcttccctatccctcgtggctgccgcatagcatgcccccttagtaaagaggttattgcccatgaacactcgtcttcccttgcacaaaagtgcaacagactgtttcatccagccctcagcaaacgtatctcccacgagaaagaccgttgagataatctgattcttaaagctctcatttattatatccaaaaagcttttgtccttatcatttttatccagagtatagcttatgctttcatctatagatactacctgtggcgttgtgcgaagatccctctttagggaataaaaaaatatactctccttttcctgcataaacatcaccacatcatgaagccacagtgacttgtcctggttcagtgcaaaataataaaagctctcctttcggtctatgaccgtaagctgtctggaatttatgccaagcctgaccgccatgccataaaacatgctcacgttctcctttgtcagccggtcaacacatataacaagcctgtcaaaggatgaaggattaccaagcttggatggcagttccataacctttttaagaaacaaggccaaaagctcctctgccataaatgaatcatcatcaatgactattttttcactattcagtgctctcttaagcagctggtcaatacacaccatctcaccgcttttagagagtcttcttgcctcatcaccataataccatttgccaatgctcttacggcgtgcaagtacaagaggaatctgaaactcctcactgcccgcaacagtgctgacagtctccggctctttcatattctgttgaaaaaaactaaccatagcatagctgtcatttaaatctatgcctatatagtatgaattgccattatgtcccattataaatcctcttaaatcagcttaaacagctgcttagtcgcagcatccagccttttatattcgtctatattgctctttaaggttgtctcatcagacagtgtatctgaaattatcatctcattaatcagattatagcggctgtgatcattgtcacccggtatattgttgcacgtaagacgattgctctctttcacctctatgctgttgtcatgctcctcagtaatataatacctgatcagctcaccgaaaaatatgacaaatgtctttacgtatatgccgtcgtacatctcaaccatatcctctgaattaaactcttcgccatcctcgtctcggctgtaatgcagcacaacatgagtccccggagtactctcatactgtaaaaatgccttgtcatagaggaaatacttctccagcagtctgtaatcaagcctcgcaaaaaaatcaaaatacatattgttatatatataatatttaagcaatgtatcttcaatctcaagttcagcctgagtgatatctgttttctcagcaaaatgcttcaatagggctaactggcaggcatcatttaatgttctgtttccaataaatcgcttttcgataatatcaaaaataaaatcagccttgcacccgccactatgcagatatccatgtgccacaagagatatataagctaaaatcagcttttcatttccggctcttttatagtattccataaagatatccgatatcttttcaggctcaatctgcgtataaataccctgttcgagaatacgctcatcgagcttcatggaagatattgaaaacttatcagcggcatgccacaggttaatcagctcgtctgtaggcccggtatagttttcacacaggtatttaagcaccaggtcactgtatttgcctgttttaaaggcagatatggcaagctgaaccataaaatcatcatctacatgctgcaccttaagcgcattctcacacaaaaccacctttgatgcggcagcaagcatgtctattccatactccatggccatatcatatgccttttcatagaggcggtttgatacaagcatgtcaataagatattttcttgcatccttttgcagggtatcaaaattaatgctttgcaaaaacggcctgacgtaatcctcataatcgtgaagctgacaatattttaaaattctgtatcccataacagctttgtaggaatcagaaaaggattcactataaaatacaggtttaaacagcttcaaatcatcctttgtaaaatcagaataatcccttacatgcttaaaatgtgacactatatactgtggtctgtcaggcgagaggcttatacacctgtcaaggtatttctcggcatccatcagcctctgcagtctgtatgagatgcttttaacatatctatagccccttgagtcctcaaaaagtataacatagtcgtttgaaaacagttcaaaataagcacactggtctgtaaccggaactatctgaggctccttcatttcattctgatatatgatagctctcactatgcgcttatcaaatacaataagcttgtgggtatatataatatctgaaaaagctgccgacagctcttcattgataaatcccaactcaagcatatcctcgtataaaacagccagattgtcatcaatatgcctaagctgtgcctggtccatggcaaacctacccatagctttcctgtacttgtggtagacctcaggctctgtttccttggcagcaattatattgttgtaaagcactgcaagctttcggtatggcagcttattatcaaagctgaaatacatctggataatctttggcacaggggaaatctgcctgtcatccatcgtaaggagatacgactcatacaagcctgtcagacgcagcttattctcgatacccagctcaaaccatttatgaaaacaggtatcatttttgtgtcccttaatcaggtagctgcatatgatgccgacatactctgcctccggacatatctcataggctgctgtaagaagctcatatactctgttatcgaacccgcctgccagatcaaccgcctcaaaaattgctccggcaagctcctttgtcagagccttttcctttacggcccagcttaggatgcgaagctcaaataccgacagctcctttatcagataaggatcctgtgatataagataataagcttcaatatacaaatacggagacgaacagcctcgcagtacccagtattttatatctttaagcttaccggcactgtcatcaaaatactgatccctcaaaaataaaagtacccagaacaaaagcacagagtcaggattttcataaaaaatcagctccacttcatgtgtcatattgtcaacgtatgaaggctctctctctaacagcgtcatcagatacagataatagccccatattggagctttcttatcaggattactgtgcttgaaatcatcaagaatccacttagcttcctgcctttgcctgttgataataaatgcctgagccttcatcagctcatacatatgctcatccggcacgagtgcatgcaggtggtttaatatgcttatagtctcgtttgcccataccccggtcactatccgcttcagcctgaaactggtataaagctccatgattccgaccatgcattcctttatgtcctttgtcacagctatatcacttatgctgccatcatcatctcttacaccggccgtgatatctattgtaaagctctgatatacaccatcaatatatatacggccaaaattacgtccggcatgcattgcagatgcatcgatgatatactcatacagataggttttacctataaaatcatcaagcgttaaaacaggcttagacagctttatgaattcacaatccgtgcgcaggcgtatctcggtatatccccagttatcctttgttatggtaaagcatccactctgtggctctttagaagccataaaaatctcctctgacttgtctacattaatggaaacaggctgttttttgtttacgccaatcagaaactcctccatattctgaccggatggtctggcgcaggcaaagccctcataggtcagtctctcatatacattgtcataaggaattgtgtttaaaaaattgcgattataaaacagatgataagcctcatcccaattagatgccgcaagccttgtaaaatcatcaaggctctttacagctccggtggatgcttccgcatagagccttgtgattcttgcacaaaaagaaagactgtactctatctgattgcatacaatcacaaatttgccctcgcaggcatcgccctccgtaaggcccttactgttaaattgataacgaatcctgactttctcgccctcgaagtgcggattcagacactccatcctaggattagtcgaataaactatgccacagatttttatctgattcgtactttctattacaaagcttcccgcttcgcttcttccctcaatgaccgaaaggtctattgtctcctctgaaaacgccaaaatcggtttcgtgccattaaatctgccggcagctatctgccctatacgtactcgcacaattgttaccccgtttacgttaaatgttgattttttatacacttattatataatgtaaattatatacgatttgcaatgctgttgcaatgcaaatagaaaggaaattacagctaatgatagaacaaaaggaacattttcacggcagtgaccttgaaaaaatagaaaaaatatacggtataaagaaagaaaatattgtgagctttgcggcaaatgtcaacccactcggtgaatccggtaaactaaggactgcactgtctgagcgcattgatgcaatcacaaaataccctgacagggagtatacttctctcagaaaggctatcggcagctactgcaagtgcgattacaatcacataacagtcgggaacggatgcacggagctcatctcacttttcattcagattacagctcctaaaaagacacttctgcttggtccgacttactctgagtacgagcgtgatttaaggataaacggcagtgatatctcctactattttcttaaggaagaggatgattttaggattgatccggatgaattcatctctgcaatcacagctgataccgaccttgtcatcatctgtaatcccaacaatccgaccggcagtcttatcgcaccggagaagctcaaaacaattttaacccactgtaaagagacaaatacttatatgatgatagacgagacatatatagagtttgtgccggatgttgatgagctttcagcaatacctctgactgaattgtttgacaatgtgattattttacgcggcacatccaagttttttgccactccgggacttcgtctgggctatgccatcacatcaaattcacaaattcttacagacataaacacaaacaaaaatccgtggatgattaactctctcgccgttgttgcaggcgaaacaatgtttttggatgaagaatatatagataaaacaagaagcttgatactttcggagaaaaccagatgcaggcaattgattgaagaatcacacaaattcaagctttatccatcctacagcaacttctatctgcttaagatacttgatgaaggcgtggatgcacatatgctatttgagcgcgccataaggcagggcatgatgataagggactgctctaccttccccgggcttgaggagcggttcatacgattttgtataatgaagccagaggacaacacaaggcttattaattgccttacacaatgatgctaaatgcctttatataaacataacatataaccaaaaagcctccggaaggatttaatccagccggaggcttttttataaagtgaaacatagaatatgctttaaggtctatattattttgcagataagaactcgtcaataccttttgctgctgcttttcctgcacccatggcaagaataaccgttgcagcacctgttacggcatctccacctgcgaatacaccctcttttgaggttgcacctgtatcctcagtagctacgatacattttctcttgtttgtatcaagacctattgttgtagaagaaataagtggatttggagatgtaccaagtgacatgatcactgtatcgcactccatctcatactcagagccgggaatctcaatagggcttctacgtcctgatgcatcaggttctccaagctccatcttgataagcttaacacccttaacccagccattctcatcaacaagaatctctgtagggttctcaaggagatcaaagataactccctcttccttggcatgatgtacttcctctttacgtgcaggaagctctgcctcactacgtctgtatacaatgtgtgtctctgcaccgagacgaagagctgttctggctgcgtccatggctacgtttccaccacctacaactacaacctttttgccttttgagataggagtctcataaccctctttaaaagccttcatgaggttatttcttgtaaggaactcattagcagaaaatacaccgttggcctgctctccagggattcccataaatcttggcagtcctgctcccgaaccgataaatacagcctcaaagccttcttcctccataagttcgtcaatcttaactgactttccgataactacatttgtctcaattttaacaccaagtgccttgacattctctacttctgccgcaacaaccttgtcctttggaagacgaaactccggtattccgtagcttaatactccgccggcagcgtgaagtgcctcaaaaatagttacatcatagccaagctttgcaaggtctccggcacatgtaagtcctgcaggacctgaaccgataacagcaacctttttgccgtttttctctgcggctgtctttggcttgatgccattctctctggctgtatcagcaacaaatctctcaagctttccgattgagacaggatcgcccttgaagcctctgatacacttgccctcgcactggctctcctgtgggcatacacgtccacatacagcaggaagtgctgatgactctgaaataatctcataagcctttgtgaaatcaccatttttaacctgctcaacaaatgcaggaatattgatagaaacagggcagcccttcatacactgtgcatttttacagtttaagcatctgcttgcctctgccattgcctcttctttattgtagccgtagcaaacctcttcaaagtttgtggcacgaacctttggatcctgctctctgacaggtactctctttaatacatcgacttccattatttgtcacctccgcagtttccgcagccaccgtgatgtgttgcgccctcttcataggcaagcttagctctgccttcctcagtcttatattgctgctgtctcttcatagcctgatcgaaatcaacaagatgtccgtcgaactcaggtccgtcaacacatgcgaacttaacctttccatccacgatcagacggcatgcaccacacatacctgttccatcaaccatgattgggttcattgaaacaattgtaggaatctcaagcttctttgtgagcagacatgtgaatttcatcataatcataggtccgatagctacacagcagtcatatgtattgccggcatcaacaagtgcctgaagctgctggctgccgttgccgtggaagccgtatgagccatcatctgtacaaacatagagattctttgcaacagctttcatctcatcctcaaagaaaaggatatccttatttctaaagcccatgatgacatcagcatccacaccatgctctttaagccacttaacctgtggatatacaggagctgtaccaagacctcctgcgataaatacgatgtgctttttctttgtctcctcgaggttatcctcctgacaaagctctgatggacagccgagtggtccgacgaaatcctctaatgaatccccctcattaagagccatcattctctctgttcctgcaccgatagtctgtactacgatagtaacagtctctttttccctgtcataatcacagatggtaagtgggattctctctcctacctcatctgtctttgcgatgataaactgaccaggcagacactcttttgcaactcgtggtgcctttatatccataaggataatattgtcagccaatttttcttttcgaactattggatacatagtcttcctcctagttaaatcttatcccattacatatgtaatctgatactcaattatttcatacttttttaattttaaatgaaatgatataatttttcaatatatttctttagatattccataaaaatatgttatatgcttatgaaattgtgttatcctctgacattcgtccggtactttatatcaaaaacaggaaccagttcatgcaaaaaatgaaccggttcctgtttttatcagcttttatgagaaatatacaagctcatcctgcggcttctcggcaggctcgatggaaaccggataaagcaccggtccctttcccttgtactctcttgcaaactccacatgcacccttgcggtgatggtaatccacgatttgtgaggaatactgctctcatcctcatacttgcacttaaagcctataaaggtcacgtcctctatacagcaggtcatcgcaaacctgcccggtaccataacaccctttcgaagcttatcaggattgtatacaagggcaagaaatttgacaaccttgccgtcgtacttcttgtaattctccatggcatccatataccagatggcataatctgcatctgaaagctcaatcacatcctgatttatatcaaacggcagttcctccggacgctcatcaatagtaccatccttgcgttcgtagactatctgggctttgcggttgatattctttatggtacgccttaggtgtcctctgtctgtatcatcgtccgtcctgttaaatatgacaacatcactcgcaaatacctgttcctgcatcatcgcgcgcatattgttcatataaaggtcaaatgtagtggaatcaactgtggcgagcgactgcacgataacccagccctttggcagctcggcctctattattttatcaatgccccatgtgccgttgtactcgataaacacctgttcaggcaaatactgcatgttgagctcattcagctttgcagctgtgaactcatcctccgagtcgatctctgcaacctggatattggcagcctttagcttatccatatcatactccacatcaccatcctcgcacataatgataagcccctttgagccattagcgaaatcattctcgaaaatggtatccttaatcagtgaagtcttgccactgtccatgaatccggtaaataaatatactggaatctcttcagccattttgttagttcctttctgattattgtgtaactatgttaaatacatttaagcaagtccgaagagctcttcaagctcatgctcgtggatatctgttccgataacaacgatacgtcctgtatagtcaggctcgccatcacgaatctcgtactcgcccggaaccatatcaaagtaaatccacttgccgtctgtgccctctaccatgccctttgaacgaagaatcttgtcatcttccacaaactgcttaaggatttcttcgagcttagcgcgctcaaacttgtgaggtgtctccttgccccagcttgtaaatacatcatcagcatgatgatgtccgtgctcatgatcatggtcatgacagccacaggtgcagtcctcgccatgctcgtgatgatgttcgtgctcgtcatggtcgtggtgatgctcgtgttcatcgtggtcgtgatggtgctcatgctcatcatggtcgtggtgatgttcatgctcatcatggtcgtggtgatgctcatgctcatcatggtcatggtgatgatgatgctctgcctcatcctgtgcatgacgtgcctcagcaagcaccttcatctcgagattgtcctgaccttccatagtcttaagaatctgctctcctttaatagcatcccaatcagtagtgataactgaagcctttggatttaaagcctgaatctgctttacacaaaactcaagctgctcaggtgtagcattctggctgcggcttaagatcactgttgtggcatactctatctggttgttgaaaaactcaccgaaagccttcatctgcttgcttgccttaagtgcatttaccactgtaacaagtgcattaagcttgaccggctgctctttttcgatatctataacagatttcatgacatctgataatttacccacgccggaaggctcgattaagatacggtcaggatgatacttggtaataacctcatttaaattcttaccaaaatcaccaaccagtgaacagcagatacagcctgagttcatctcagtaatctgaatgccggcatcctttaaaaagccaccgtctataccaacctcaccgaactcattctctatgagaactatctgctcacccttaaaagcctcatctatcattttcttgataaatgtagtctttccagctccaaggaaacctgaaataatgtcaatttttgtcattgtaattcactccttttcttttcactaagtcctattttactagcaataatacaaatatgcaaattaaatttttattattaaattatgttgacacataacaaaagaactaccgcacgcggtagtcctctctaatacattaattgtattttctttttctagctgcttcagatttcttcttacgctttacgcttggtttctcgtaatgctcacgcttacggatctcctgctggatgcctgcttttgcacagtttctcttgaatctgcgtaatgcgctatctaaagtctcgttttctttaactattacactagacataacctaaaacctaacctccctccagttgtgtattgtgcatcaactgttaggtatctatacttaattgcactaacatgtattttatcaaaatatccggatttgtcaagataaatccggatattttttcaagaaattattattttaattatatcaggtaaaacatcactccaaaatgactctaatcaagcttgataaagattgatgtttcttttttcagcgaatctgcaatctcatagttttcatccatcttgtgtgagatattgtccatatcctcaacaataagctgtgtactgtcagccgctgaaaccactccgttcacaccctcatttatagcatgtgatatggtgttgattgaagaagaaatctcaagcatggactgcttcagtgaatcagtcttctccttgaaatcagtcatggtaccctcaatgaatgaagccttgtcgttgtactccacaccggactcaacaaatctctcaaactccggaagaatcgaatcattaatatagctgacaagaccattggcgttgtcagaaagattgttaaccgaattggtaactaccgcattgatacgctggatattgttggctgcctcctggctggctgcagcaagctggctgatctcactggctacaaccgcaaaacctctgcctgcctctcctgcccttgctgcctcaatagaagcatttaatgccagcagattggtctgacttgcaatgtttaaaatatcattggtaagtgaattgacctgctttacgctgttgctatcctcaatagccttctgcaatacctcgagaatctccgaaaccttcctgtctgttgactccatgtttgtacgtgcaacagactccattgactgtgcatgggccttcatatccttggtgtatccggtcagttcatctgtcttttcagcaataagctcaacctcttttgccacattatctgtgttggtattgataacagatgcgttttcagagatatcctgcatggtagcagacagctcctctgttaaagccgaaagatcggacacactgctgttgcttgtctgaacactctgacgcacatcatcaacaaccctctccatcctggccgagttggtgacaacagccttgaatatagcctgcagctttgtcataaagacattgatgcccttgcctacggcgtcaacctcagcattgttgataggagtaaccctctgcgtcaaatcgcccttcttgttatcaatattgactatgatgccgttgatttccttctgtgtacgaagcagaggcttgataaccatggtgacaacagcaaaaacaacaaacagtaatgcaattatacttattgcaatagtaaatgtacatgtgacaacagatgcgcgataagtactttcgaggctctttctctcctcctgtgtaacagaattgacatgctcacgcattgacgaaatagctttttcaatgttattagaatattttgcaatagagccatttgccgttttatacgcttcctcgtttttaccggcggcagaataggccattacattgccacactccttgaccaggcttgtatagttttcacagataattctatagtttctcttggtctccaaggttacataaggattataatcatcaaggagctgctttagcttttcctcgtgatttctcacttcacttacaatatcaatcattgatgatagatccgtcgatataatatgagccagtgccagtgtatgaatattcacggtctccatctcaatatcattaagcatctccgtgccaaccattgaggtgtccacaatctgagaagcagcatcatttacctttgataaatttttaagagataaaccacttgaaataacacttacaaagcctacaacaaaaacaggaataagtatcaattttgtacttaactttttctttcccttgacctttggtttgttattaaccttttgagctttttttgtgttgagagtttttttaacttttggtgcttttgcagaatttgctgtttttgctttcacctttttttgttttactgcgctatttttaacagcggctttacttttttttgaatctaatttcatgttatatacccctctactcagctacagattgtgttatccccgcaacaagattatccattatctcctgaagatctgtattatcaggattaccggccgccattttttcgccaaactctgtcgcagcatcccagtaagaatttccaactctttggagctttccgtactgtgcctgatccataacagccataatagcaggaacctttttgaccgcatcatctgcggctgccgctttattggcagggcctgcattcttcatctcaaagcggagcttctggttatcctcgtttgtaaaccactgggcaagcttatttgcccactcaggatacttggtgtatgcatttacagccatatatttatagcctttaaacgatgacatctgaatctgctgtccggcacatgtgtatgtaggcagctttacagcaccataatcatcgccccataattccttgatttttgccgcattccagcatccactgacaccggcaataatacttccgtcctgtactcctgcaataaaatcgtcctgtacacagttcttaaagcccggcttagccgcaatatcaagcatagcctgtgctatatcaacacccttgatgtccgtgatgacagaattccagttgcagtggtttgtcacaccatcatcattcacgccaaaatcaagccctgtatttccaaaaaatgaatacagataccagcctgagctccagtccatagtcaagtacttaccattggcccctgcaatgtcgagcatgccatcaagcgtagccacatcgctgtctgagaaataattcttattgtaatacataaaatatccattgtcagcggtcagcggatatccatataatttgccatcgatagtggcagcctcaaccgcactttcatcgttagcctttttaacggcatccacatcctctatctcataaagagcgcctcccgctaccatagaagttatctggtcatccgctatagggaatacatccgcaccattatgcacatttgataatatattatctctggcatcagaatcctctgactcctcgataattatattaaaatcagttcctttattagcctccttgaagctttcaatcatctgtgtagtaatatccacatcattcttcgaacaccagacgtgcatctttacttccttattcttcgctttatccgaagaattctccgtcgtccccacctgtgtattgtcatgtgatttatttgatactccgcatccagtaagtaatgaaaccccaatggcagccacaagtgttgcagctattaacctcttcatacatattcatcctttcagtttaatctcaatttataatttagtacaattttaccatactttcacacaaaaaaataggtctaatttgatttttttaacaaatttagacctatttttttaaaggatgcattttaaagcactatataagcatttttgttacttaatcatacctgaaagtgcgtcctttactgaagcaatagcatcaggaatacctgccgggttctttccaccggcctgagccatgttagggcgtccaccgccgccaccgcctacctttgaggcgattgccttgattaagtttcctgcatgcgcaccgctctttatggcagcgtctgttgccatggcaacaagatttaccttgccttcatttgaagaagcaagcacgataactccctcgccaagcttttccttgatggaatcgccaagatcacgcagtccgttcatatcaacgccgtcaacacttgttgcaagaagcttgatgccgtttacatcaactacctgatccataacatcgccgagcgcatcctttgctgccttgctcttaagagactcattctcactctgaagtgccttcatctcagccatcaggtgctcaagtctctctttgaggttggcaggagttgatttaacaaccttagcagcctcctcaagctccttctccatattgctgtaataagcgaatacattgtcgcctgtgatagcctcgatacgtcttacgcctgcagctacaccgctctccgaaagaatcttgaataccttgatatcagatgtattctttacatgtgtaccaccgcagaactcctttgagaaatcgcccattgatacgacacgtaccttttcaccgtatttctcgccgaagagagccatggcacctgtctttttagcctcatcgacagtcatgatatctgttcgaacttcaatagcttcgttgattttctcgtttacgatatcctcaacccttttaagctcctcagcagtcatagcagaaaaatgagagaaatcaaaacgtgttctctcagcatcctggtaagaaccagcctgctctacatgtgtgccgagcacctcacgcagtgccttctgaagcagatgagtggcagagtgatttctgcatgtgtttgttcttgtttttgtatcaacagaaagtgtagccttctcgcctgtgcggatcataccctctgacacatatcctacatgtgcatatctgttgccgacaacctttacagtatcctcaacaacaaatgtaccgctctctgtctttatgatacccttgtcaccctgctgaccacccattgtggcatagaaaggtgtgtttggcacgatcacagagcccttatcaccatctgaaagagcctcgactacatcatccgatgtggtaaggaaagcaatctcagctgtgtcagtaagcttgtcatagcctgtgaactctgtagtaatttcagaatctatatcattgtaaacattggcatcagcacccatatagtttgtttccttgcgggctcctcttgccttctgtctctgagcctccatacaactctcaaagccagcctcatcatatgtgaagcccttctcctcgagaatctctgccgtgaggtctacagggaagccgtatgtatcgtaaagcttgaatgcatcctctcctgagagaaccttgacgccgtcagccttcatgctttcttccatatctgcaaggataccaagtccctggtcgatagtctttgcgaacttttcctcctcctgagtgagtaccttaaggatgaaatcctctctctcctcaagctccggataaccgtccttgctctcatcaatgacaacctgcgcgatttttccaaggaatgctccctgtatgccaagtgtacgtccgtgcatagcggcacgtctgatgatacggcgcagcacatagcccctgccctcgttagatggcataactccgtcagaaataaggaatgtagacgaacggatatggtctgtgataagacggatagaaacatcgtccatctcatcgacatgatatttcttgcctgaaagctcgcagaccttgtcacggatagccttcattgtatcaatatcgaataccgaatcaacatcctgcattacaacagcaagacgctcaagtcccatacctgtatcaatgttcttgtgctcaagctcagtgtatccaccgtgtccgtcaccgttaaactgtgtgaatacattgttccacacctccatgaaacggtcgcagtcacagcctaccttacaatcaggcttgccacagccgtacttctcaccgcggtcgtagtaaatctcagagcaaggaccacaaggacctgctccatgctcccagaagttgtcacactcaccggtctttggatctctgtagaaacgtgtaatacgatctccaggcactcctacttccttagtccagatatcaaatgcctcatcatcctcaccgtagatggaaggataaagcctgtccttttcaagaccgagcacctctgtcaaaaactcccatgaccatgcgattgcttcatgcttgaaataatcgccaaacgagaagtttccgagcatctcaaaaaatgtaagatgacgagctgtcttacctacattctcgatatcacctgttctgacacacttctggcatgtagtcacacggcgtcttggtggaacctcctgtcctgtaaaatatggtttaagcggtgccatacctgcattaataagaagcagactgttgtcattgtgaggcaccagtgaaaaactcttcattgcgagatgtcccttgctctcaaagaactcaaggtacatacgacgtaattcgttaacgccataactcttcttcattacttgaatctcctattcttttgtctttgcgtccttcattttacgaagctttacccctattaaagccccacaaaaacctatggccgccaaaacaatcataataataacatattgtgctacgcacatgaaaaagtcccccataattaccctcctaaatttattgaactaatttattataaatgaatttgtgaaataattcaatagttctctccaaaagcaaacgtctgattttcacgttcaatctcaataaccctgtcagccttgtccttattgctgagtctcttcttgtattcaatgataccgctgtagtcctgccacatatgcatagggaaaacaaactctgccgaggtattttgtaaaaaataatcaaaacccttgaactgatactccataagctttggatccatcgggaaaaaagccacgtttattggtttttccgaaagcttttttatctcatgcctgaaggctctgcgcactctgccgtttatcaaatcaccggcgccatcccactcccagtcgtttaaatcaccggcatgaaacaggctcacaccgtttgaggcaacataaaacgccacaccggcatcggtggatctaagtgtcattatatccagatcatccacatgatatgtattgtcaggtgaaacaaatgtcaccctgtccctgacagcgggatcaatgccatgctttgacaaaaaatgcggactgatacggatatcctttgaaaaaacataatgtatattcgaatatttgtcagtcagacgcaaaatatccatatcataatgatccttgtggctgtgacttgcaaacatatagatttttgtatccggctcataagatggcagctttccggtaaaatgcataccctccaccttgtctccatcaaaataatcaaatataagcaccttgtcatccagttccacaagaaaacaactgtgatgtataaaaattatctgcatgtaacctactctctttcgcttttaaatcagtctttatgtatcattatgctatctttatgctatatagtcaacttatatttcgtataatatagtaattaaactctaattaccaatcaataattatatgattaaagggtcaaaataccttttgacccccatatcattatataattatacaaatcatgccaccatttgagtcattcacaatcttttgcatggtttcctgaagctttatctggcactcatcatccatctgcattattttgcttcttattccgtcctccataagctcaccgacagactttccaaaaatattagtcttccagactccactgtcactgttttcaccattttttatgtaatctatcagatcctctgcctgttccctgcttccgactatcggcgctatctcggtctcgatattagcccttatcatatgtattgacggtgaaatggccttcatttttacaccaaacttgtttccatgggctataagcacaggctcctccattcggatatcagacagctgtggcatcacaacaccataacccttctgctgcaccgatgaaaaagcatccttaatcttttcgtactcattcttttcctcagtgagtgaaagaatcagggaaatcagctccttttccccggaaacagtcacaccgcacagcgcggaaatattctcgtagtagtacttctctgcaatctcaattttaacctttaccacaccatcagacagccccatcccggcaagagataccacttttaatatatccccatccgattcaggcatatcagtgctcatctgtgcgacatccttcagctttgaagcccttgcaagaaaagtctttgcatatgtaattacggcctgctttacataattgtcataaggcagaagctgcacccatttcggtatatcatagtccactctcgtgactgcaaattcatataagagcttttccatgatatctgtaatctgtcccatgcaaagtttttcacagtctataggaatagcagccgctttatactctctgctaagtgactcgcataaaagtcttgtttctgccgcaaaaggctttgtagtatttaccacaattacaaatggctttcctgaagcctcaagctgcatgactgtttctctttctgctgcctcatagctctgtctttttatatcgcctatgctgccgtcagtggttacaagcacagccactgtcgaatgctcctctattaccttttttgtacctacaactgcagcctcctcaaaaggtatatcctcgtcgaaccacggtgttttgaccatacgctcgccgtcctcctcgagataaccgacagcatcccccactgtaaagcccacacagtccacaaggcgtaccttcacagcgctgccatcatccagactgatagtaaccgcatcctgtggaataaatttcggttcagtcgtcataatagtctttcctttgcctgattgcggcagttcatcgactgcacgctttttagcatactcattgtccatcttcggaattacacaaagctccatgaaatgctttataaatgtggacttgcctgtgcgcacaggaccgacgacacctatgtaaatctcgccgtttgtgcggcatctgatatctttatataaatcaaactctttactgtccatagtactgcccataaaagcttcctccatacactttattctataatcaaagtgtattcacctgctctttgaattattacacataaaaaggccacaggcttcaaaacagataacctgtggtcttttgtaataatatatagtattttaaaccaaactacttagcaacctttttctcacatcctgctgtcttgcttgtagaagtatcagctgtttctttagcatctgatttgtcagaagcctcctcaggctcctctctcagacgtgcgtacatctgcatacacttgtgaagcttctttgcaagcttattgtctatctgctcaggagtagctctccactgccagttgccaccggtagttgaaggaatgttgatacgggcctttgaatcaagtccaagcagatcctgcataggaacaatagccatatcggcaactgatgaccatgccgcacgcatcatgccccagttgtagccctcctcctttgtgaggtttaagtaatcctttgcaaaccttacgcaatcctttggagctgtcttcatccagcccataactgtgtcattgtcatgggtacctgtgtatacaacacagtgctgcggatagttatgtggcagataatcgctatcttctcttgaatcgaaggcaaactggataaccttcatgccagggaatcctgaatcctttaaaagcttctttacggaaggtgtgaggaagccgaggtcctccacgatgataggaagcttgccaagcttcttctcaagcacgttgaataaatccatgccaggtccatctttccatacaccgttctttgctgtatcatcctttgcaggaatagcatagaatgaatcaaaacctctgaaatgatcgattcgcactatatcataaagctttgccatagcactgatacgctttgtccaccagctgtagctgtccttcttcataacatcccatctgaaaagaggattgccccagagctgtccgtcagctgagaaggcatcaggaggacatcctgccacctcgattggatttaagtccttatcgagatagaactgtgtaggattagcccatacatctgctgaatccatggcaacataaataggtacatctccgataattcttatgcccttttcattagcatatgcctttaaagcagtccactgcttgaagaagagatactggagcatcttgtagaaggcaatatcatctgcatacttctcctttgcttcttccatagcctcaggttttctaaacttaagagcatcatcccactcgctccatgccactccgccattggcatcctttaatgccataaagagtgtgtactcatcaagccactctgcctctttactgcagaatgcctcatagtcagccggtgttttctttgaaaaacgctcatatgcctttcttaaaagagcatatctgttgacatacataatgccatagtctacatactgtggctttttgccccacttatatgactcgcactccttctttgtcagaagcttgtccttgcataaaagctccagatcgataaaataaggattgcctgcgaagcttgaaaatgactggtatggagaatctccatagctggtaggacagattggaagaatctgccagtatgtctgacctcccttctcaaggaaatcgacaaaacgtcttgcctcctttcccatagttccaataccatactgtgatggcagtgatgagattggcattaatacaccgctagttctcatgttatttttcctcccttttgttgtatactcattgtttggctgcgtgagcctgtattttaaaataatatataatatacatatgaaatcatatgatattttcgttttatttagttattataacatcataaagtgcaacttgtaaattaaattagttaatgttaatatcaaattaataactcaaacttcgcacgtagattttagctatgcaccttgaaaattcaatacctggcagttattcagttgtcaatgttcagaccttaagcagcttggagttttgttttcaacaatgcaggaagtgcatccataaatacattcgccaattcatcgattttttcgtctgaaagttcagtgttatctgaaagcattgttctgaacatttggagcagcatttgaaaagcctgtatccatgtgatatcagacatttcgtcagaaaagtataaaaagagctccccaagtgaccggttatcattggattcccggctttccagtgacagcatcatatatcgggtgaaaacaactgcggtatgcgcagtcattgcatcataggacagagaattacattctctgctcaagttaaggtagcttttgcataccttgaaaaatacctctatatcccagcgttttccataaatccggatgatttcattttcatccagatttacatctgtggaaatgagacagagatattccttgcgtttgttgcgattgcgaacataaactactttggcaggaatgatgtccccatccttcactacatcaaccataacagaaagcagatattttgatttgcctcgtctctttttatttttgttgtaaatggagattaaagacatatcttcaccatcgtagcgaaaaaacatttttggagattttttcaccattccgattacatctaaatccattcttttgacagcatgaaaggtgcttggagatgaaaaccagctgtcaaaaagaacatattttgccggaattgcagcttttttagcagcttccagaagtgcaagcatggcatgggttcccttttccatagacagctttctgcgtctgtaaccaacggttcttttgtctatctcagccgcttcattgatacgattctttttgttttctgtagaaagaagaatgctgtttaccggcaaaaatgtactcccatctgaccatccaagagtaagcattctaaatccgaagcgatatttatgttttgcgtggtcatagacctttgcaagaagctctacctttttagaacggttacgttcaaacatggaatcgtcaataataagaacattggcacggtcttccgaatccagtggaagaatagcgttgtttatgattctggatgcaaggattgtagtaaaacgcatccagttaatttgaaccatcttcatgaaacgatacacggtatcttttgcaaaatcaggagtattttttcctgtaagcagactcatatacatacttctgttggagaaaatcagcagaaacatgtattgaaaaatctccgttaccggagtgcctttccttttataggcattggcagctttcaaggctgaggaaatatgaaaccttgtgaaaaatcgtttgatagatttagaaatttgcttatcattttgagtcgcttgtgttatacttttatccatagcatgagcctccggtttgtaattgtttttggcaactcaattatatcaaaaccattggtttcatgctatttttatgccagttattattgaattttcaaggtgcataggcacattttaatgtgcgaagtttgagttaataaaaagtttaaaagaggtgtaacaaaatgaatgaaacaaccaggcaattgattgtgcataaggtaaagcataatacgaaacgccttataacatccattaaatgggtaatcttttctatcgttgtcggcatagtcgcaggaagctgcggcaccacattttattttgccctgtcggtcgtaaccgatttcagaatgaaatacccttggctcatttactttctgccaatcggcggacttgccattgtaggactctatcatctgtgtaaagacgataacgacaccggaaccaatctggtaatatcagctatccattcaggcgacaaggtgccctttataatggccccgcttatatttgtatccacacttatcactcacctgttcggtggctctgccggccgtgagggtgctgcactgcagatgggaggcagcatcggaagctctataggcagggtatttagatttgatgaaaaggacaagcatgtcatgattatgtgtggcatgagcgctgcattcagtgcactgtttggcactccgatggcagccgctattttctccatggagatgataagcgtcggtgtcatgtattatatagcactcgttccatgtgtgataagctccctcatcgctcacggtatcgcatcatacttcaatgttacaaatgaattttttgctattgaaaacataccggactttaccattttaaactcagtaaaaatctctgcgcttgcaatactgtgcgcactcgtaagcatactcttttgtgtggcccttcactcaagtgaggcgctgtacaaaaaatatctgcctaacaaatatacaagagtattcattggtggctgctttgtcatcatagcaactatgcttgtaggaaaccagacatacaacggaaccggaatgagtgtcatccaaagcagtatagacggctctgtcagacctgaagcatttctgctaaaaatcatcttcaccgcactgactcttggcgcaggctttaagggcggcgagattgtaccatcctttttcataggcgcaacatttggatgcctgttcggcaatctgacaggctttgagccatcgctgtgtacagctgtcggcatgatttcactgttctgtggtgtcaccaattgtccgattacatcgctgctcatcagctttgagctgtttggctacgacggcatgccgtactttcttttggcaattccattcagctatatgctgtcaggatactttggcctgtatcgcagccagaaaatcgtatattcaaaatacaagacaagctacataaataaatcaactcactaacatttgctaactgcaaccaggcatgataccccaggtattattgcctggtcttttattgtgtaaagagctttatctcccgcagaagattcatctgcaagaacctcccacaaagcatctgcaagtttaattgtgattttatttttgccggcattgtaagctacgaacaccttctctgtatcgttatcaatagtatatgctacaacgccatcaggcatatcatccatgaaatgtacggatttcttaatctcatctactgtgtcaagataaaatgacttgtgagcccttcttagtgctataagccccttatagtaggctttaaggtccgaaaactgctcagccctgtcataatctattgcattgacagagagaggactgcaatagctgttctctacaggagcaccatcagcctcactaatctttgttctcgcaaactcctctccatgcaggaaaaacggaatcccctgcgctgtaaaaaggatggctgctgcaagcttattcatacggatacgtatctcttcactctcatgtgaattggatatgataaacctgtcccagagagtatagttgtcgtgacatgacagatagttaatcgactgcataggcgatttggcccacttagcgcacgtaacagcctgctttagctcttcacctctgtctgcagctccattgacaaagcccagctcatccatatagaacacatgtccctttaccgcatcacgtatatcatccgaaaacatgccgatgcccggtgtccttggagcatttattttcatgccacgctctgattctggcagagtgctctctccacctgtccagccctctccgtacattattatatcaggatttatttttaagagagcttttctggcttcgttcaatgtctcgatatcaagtactcccatcagatcaaacctgaagccatcaatgtgatactcactcgcccagtagcacagcgaatcaatgatatattttctgaccataggcttctctgaggctatttcattgccacaggctgatgcatcagagtactttgcagcatccagcatgcggtagaaataattgcccgcagtcttgtaaaagcagctgtcatgaacattgaaggtatgattgtaaaccacatccatgattacaccaagacccgcctcatgaatcgagtgtaccatctccttatactctctcactctcacggctccattaaacggatctgtcgagtaagagccctccggcacattgtaattgtacggatcatagccccagttatactgctcctttaaggaatcactctcgtcaatgctggcaaaatcatacgacggcataagctgcagatgtgtcactcccatatccttgaaatacgaaagagttttatcctcagtaaatgccttaaacttacccggatacctagaatgagcagatgcaccggcagacacatccgcgacagacacctcagtgataaccatgctcataggatctgcaagctttggcctgtcctcatctgcaaatccataaggattagtctttgacaagtcaataaccatagacctgtgcccatttacaccgcaggctcttgcatacggatcatgcgagctgaatgtgccatctgcggtatgaacctcatatgtataataaacaccatccagattaccctctgcagtagcagaaaaaatactgcgaagctctccctctccgcgcatcatctcaagcctgcctgtctcggtcgaatcatttcccttatcataaaaaataacaaaaacactgtccgcaacaggcgaaaacagtgtaaatgttgtcttttcctttgaataaatcgctcctaatttcataatactatccttttcgtttattttcgtatacattataataaaatttacaataactgtaaatagggcaattcaaccaatttttaaagactttttagtcaatgtgccattttttcttttgctgatgtgaaacaatctttatatacaaagattgtggcagaaatctgccacaggttgtagcaagcttcatcctgagagtaggcactatgaccgttttgtgcttcatcatccggtctatggcataattggcgcagtattcagcggaaatccccttcagcgcaaatcgcacattcgccacatcattgaactctgtatcaaccggtcccggacacagacaccccacatacacatggctgtggctctgtcgaagctcacatgcaacagcccttgaaaggctcgcaacatatgccttagaggcataataggcagccatgtacggaccggcaggaataagaccagcagagcttgccacatttaatataaagcctctgtcctttaccctcatctgtcttaaaagctttttcgtcaggaagtgtacagcacgcacgttgacatctatcatgcccatttccttagctatatcagtctcctcaaacaggccgcaatcaccgtagcctgcgttgtttataaatatttctatgtctttttcctcgagatagtccgaaagtctctgacactcatcaagctgcatcaaatccgcggtaaaaatatcacactcaagctccttatgcatggctttaagcttatcagaaagagctgtaagcctctcccgccttctggcaacaagaatcaggtcatacccctccttcgcaagtctctttgcaaactgctcacctattcctgagcttgctcctgtaatcactgcatacatatatcatacccctctattcttcaatcataagctccctggagctcgcatcaagctctacgcttgtattgtcgctcttatacatatcaagcagcaacagccacagcgtgtgaatctcgtaggtgagaatattggatgctggcaccgagtatggaagcagtgtgctgatatcaaagtatctgataccaagcggcggtaaaaaaacaaggttggttgtctgtcttttatcaccggcagtatgaatcatctcatatgtaatcatcacaaaatcactgcccttataggtacactcatatgacacgtagcactcatcaacagtccaggtgatgccatcctctgtaactgtcggctttactgcctcatcattgtactctgtagtctgacaggaaagcttccacttaatctgccccttctttgtttcctttaccatatcggtaagctctttaagtaattcatcttcttttttcatattatacacctgttttcattatcaatgctcatcaactctcacaccatgtaccacaaacctgtatgtctcaccgcttgtggagcaggttgaaagcgtcacaaccttgtcatcctttgtcgggactatgcctgtatccttcattgatgaggcagccatcctctgtacgaatttgccaaatgtctcgtcaggctcaaagcccacagtatactcatcactgtcatcactaaccgtttcatatgagaaaatctggtacctatacttttttccatcgacaagtatctggaaatactgatggctgtcatagtaattctcatcacggttatagtacttaagctttccaaacatggacaggtttttcatattgtgtccataaatgattgtatggcagtcgctgaaatcagtcttgtttgaaccctcaaggaagatggagcctgcagtggcatgctctctcttaaaggtctttctgaggtaatagctattatcccccgaatacatgacagggtagctgatatcctcattctcaaaataaatccagccaaccacatcagggttttcgcttcttagaccggcgaaatcaatatctatatcatcataccacggagactgtgcttcactgcctttcgtgctgtcatcatccttctttgaatcgtccactgcatactcatcctgaagcttctcatatgtcttatccgaggtattatagtcagaataaatcttaaacagatgataacccgaataagccacaagagacaaaccgattatcagaactataaatctaattactttcttaaccatttgttttctccatttttttatcagtcagtactgtaataccggtaaaaataatcaacaatacaatgaatacaaatttaccttgcgaggttcctaaaaaagaagccggataaccaagcaccgggatatcaaacacaggcactccgaccacatcagaccatgcaaccggctgtacatcattcacctgattggcatcgccctttgtagtgtaggtcttttcatctgtatttatttcaactaccctgtgagtcacaagctcgccatttctgtaaaaggtaatggcatcacctgtctgtatcccaccggcaccctcctttacatacaataggctccccttcatgtaagaaggctccatgcttccgcttacaactaccatcggctcgatactaaacagcttgggagcaaatattacagcaataattaaagcaagaattaataaaattatactggaaataatgttaatcagtctcctcacgaaaacacctctatatcagaaaatatcatttgtcactcacaaaactgctgtagcagcttaccggctcaatatcaaattttatcgtcatattactatgtgtgtcacacgtatgatcgaacctatcgataatacgcttcatgacatcggaggctgtatcgcatgagcacttcgacaaaagcacaatgtactgtgaatcactgtactttgctgccacatcacccacacgcaggcactttctaagtgctctttcaagtgtatgcatggaatccttcatctgactatgattcttatccggctgactgctatacattggcacaacagtgacaagcaccagactctccggaatcgtagaacgggcactctttctgacctccagctgatagatttccttgaacacaggatatccgcacatgaaaacaccattcatgctctcctcactgatatcgtccttcacttcatctatattgtagcttgaagcaccctttgtgacagataaaagctcctcatacaccttgttgagcatgacagtctttctaacgccaagatccttgtccataatagccttggcagtctcataagtatcaaaagccatctgtacctttttggtacgcatgcgtgccacaatcagatatgagtatatctgctcatccgaacgttcatatacaatagccttggtgcaaagctgctcaagcttctcatagcagcctgtatcaatatacagctttgccagagcctttactgtatttacgtatctggaatggtaaaatgcattgagcgtcataaaccagtgtgtatctgtcctaagaggcaggaaatctccatggtaaagggctatggccttctcatagctttcaatagcggtctccttgctcctgcaaaatgccatctcagcctcatttatatatctgtcaaactcttcgacatcaatggttacttccacatcatcattccatttgtacaagccgcctcttacagagactatgcactcttcgtcaaaagaagcatctcttagagcctttctgagtctgtatgccagattcttaagggctcctaccggattatcagtctcctcctcaacctgccatatagcctctgaaatatcctctatacagacacccctgtttctgttcatcgccagatatacaaacagcttttcaagcttctcagaccgccatgccccttcctggacagatgttaagtcattacctaccgtaaagctgccaaaagtttttaatttaatcatataaatctccctatttctgacattaaacattatatagtcataaacatattaagctactgaaatcccaataaaacgcaaaaattaattccagattaaaattttcgcaaatcatcactgccgtcatcgacagtattttgtattttcattatcttaacgaagtatgagtaatcatcatttacctttacctcacacctgtcacccaccttgtgcccgaatatagcggcaccaagcggtgactccttgcttatcagattctttaaggaattgccccttacggttgtgacaatcttgtatgtctcagtctcatcatcatcctcaaaatacacatcaaccgtattgaacatacccacctcatcatcctttgactcatcggatatgacaacggcagtcttaatcatcttctcaaggtatctgatacggctctcgttctggttcttaaactgcttggcggccttgtactcgaagttctcgctcaagtcaccctgagctctcgccacctttacgtcatcaagagccttctttctgacaacgagctttctgtactctatctcgtcctccattttctttatatcatttgctgtcaattcatcatgcatgtcttaaaccttcttcctgcaaaattgcgtcaaaatgtatttagagaagccctgcgataccacaaagcagcacaatcgcaccaagaactatacggtaccatccaaacacaataaagttatgcttctttatgtagcccatcaggaatttgataacaataagtgaaacaacaaatgccacaatcatgccgataatcagaatagctgcctcttcccctgtaaaatgaaatccaaatttaacaagcttcagaagactcgcaccaaacataaccggaatagcaaggaaaaatgtatactcagcggcaacagtccttgaaacaccaattaagagagctccgacaatagtagcgcctgaacgtgatgtacccggaaaaacagctgcaataagctggaaaaatccaatcataagcgcagtcgtgtagcttatgtcgacaagtgaattaatcttggcagacttgccattatgtctggtctcaatcacaataaaagcgataccaaagagtataagcatgatagctactgtctggaaattgtaaaacagtctctcgaatacatcatcaaaaagcactccgataatagctgccggaatagttgaaacaagaatatgaaaccacagcacgaagatatcagtcttgacccatgcaccgatacctgtctttgcaagaggagctttgttattcttcctgccgaatggccagatctggctccagaacaaaacaacaaccgccaaaatggctccaagctggataaccacctcaaacatactgtaaaaatcgtccgggttctttcctattctaagtggtaaaatctcattcaaaagaatcatgtggccggtgctgctgataggcagccactctgtaatgccctccacaattccaaatataacagacttgataatgtcaaagatttccataaataaatttccttcctttaagatattttctacaactaatttattatattatttttccaatcacaagtccatggaatttaagaaaaatttaaattaaatcttttcatattagaaaattttttgtaaaatactcatagcaattatgaaaaagtgaaaggacaaagacaaaacatgaagaaaaaaatcagtatcatgctttgcatagtactcttcgccctgacaggctgcaccaactccggcagcacaattcgcttcggagcagccgatatcggcggaatgtactattcatttgcaaatacatttacggagcttgccaatgaacagggctatgactttacctgcaaggtccgtaccacagcaggctctaatgccaatataaggcttttatccgatggctatatagagataggtatcgcacaggctgacctgatagccgacgcctacaggacaaatgaagatttaagggctatagcagggctttacaccgagacctgtcagcttgtggtccgcgctgattcagacatccagactcttgacgacctgtcaggacacactgtaagcatcggagcagaggaatccggtaccgagcgaaacgccacacagattcttgagttcgccggtatgccatcatcccttgttgccaccaaaaacctggactatatcgaggccacaaaagagctaaaagccggtgatatagatgccttcttctgcactgccggactcaccaccactgtcatagatgagctctcaaaggaatgcgacataaggcttatcccgctgactgatactgtgataagcaagatgcttgaaagcagctctgcctacacaagtgaggtcatacctgccggcacatacacaggccagaccacagatataagcactataggtgtaaaatctgtgcttatcacaaagtctgatgtatccgacgatacaattgagaagcttacatcgctcctgtttgaaaaagaaaatgagctctcctactccaactctcttaagcttgagctgacatatgactttgcaacagacgatatgcctattccatttcacaatggagcgaaaaggtattatgaagactatggatatagcacaaattaattcgcgaattaatttttagtccaatatataatattcaaaatttaataagaacataacaagaatataatcaattaaaattgaaaggtaacacatgaaaatacaacttgacatgtaccagacactggccgttgccgtgcttgtactactacttggaaactatttaaaaaagaaaatatatttccttcagaaattctgtattccggcgcctgtcataggcggactgatttttgccatcatgacatgcatatgctatgtcacaggaatcgcagaattttcctttgatgacacactgcgcgaggtctgcatggtattcttctttacatctgtaggctttcaggcaaatctcaaggtattaaaaagcggaggcaaatcgctcatcgtattcctgggactggttatagtgcttatcatattacaaaacttaaccgccgtggggcttgcaaagctcttaaacctgaatccgctaatcggcatgtgcaccggctctattcctatggttggcggacatggcaccgcaggagcctttggcccggtgcttgaggacttgaacataaagggcgcgacgaccatctgtacagccgcagctacatttggtctcatctttggaagcctgataggcggacctcttggaaaaagactgattgaaaagcatagcctgcttaatacagcagcaaacgaggatgacagcctgctggtggaggatgagaaaaagcatgagcgccacacaaatatgtacgctgatgccgtattccagcttatcctggcaataggtgtcggaaccatctttacaatgctgctcacaaagacagggctcaccttcccgatatatataggagcgatgctcgcagccgcactcatgcgaaacatatgtgagtacacaggaatcgccactatccatatgggagagataaatgacctgggaggtataagcctctctctattcctaggcatggcaatgattacactaaggctctgggagcttgcatcactcgctctcccgctcttcatactgcttgcagcacaggtgcttctcataatcatattcacgtatgttatcgagttcaacatcatggggcgcgactacgatgcagccatacttgtgtcaggcacctgcggcttcggaaccggagccaccccaaatgccatggcaaatatgcaggctgtctgcgaccaatatgtgccatccatcaaggcatatctgctcataccgcttgtcgggagcctgtttgctgactttttgaacagccttgtaatcacattctttataaacttactgtaaaacaaccggagaaaaatatgtttgaaaaactgaaaaaaatatttaaaaacagagacgaaaaagaaaaacataattacgatttaacttttgacaacgtggcaatacctgaggtgcacgtaaaaagcaccgaaagtcacgaggacgctgataaagaaaatgcacctatcagctatgacaatgttgccatacctgaggtacatatcagaaacagaaaaaataaataaactaaaactccatatgccttttgccctttcacaaagctcctatccttccctgcttattgtccttattctgccttctcaacagatattatctttccctcaaacggatccacctctgaaatagttccggtatattttacagtcaccttatctccgcttgcaacaccctcaagtccgtcaggcttctcatcgaagttaaagctgtatggtgtatccttgtcatcagtcactacaaacatgaagtcctttatgtcatcgattgttcctgtaagctccttctcttcctgtgagcccttttcaccttcatccttggtatcagcctgctttgcactttcagtgccagctgccttatcctgctttgtatcgctctgtccgcagcctgcaaacaagccggcgcaaagcatagctcctattacaattgtaatcagttttttcttcattatgatatacctctttctttatttataagcactactatgagtacgttttctaaagagtactcttctatccacctaaagtaaatagaatacataaaatattaaaaaaatcttacgaattactgcttttttgagcctcttgcgagccttgcaggataccatttttcaaaccatccggtaaatatgcccatcaatacaggcatcagattgtttacgacaataagtgcagctccaacacctgcctttttcagtagaaatgtccacactgctgtcaacacgtataatactccccatgccgccgcaagtatataattcgtcttcataaagagaagatttttatgtgcggcttcaccgccataattgtatttcacatatgttgcgcataaaggctcctttgtcaggcatgaaaccagccagaacagcccaaacaccagatatccgatatctgttgatatgtcacctgctcctgtcaggcttgcaatcgcagaaagtatagcaacagcaacaattgagagttgatcccatattacaaatttatgttttctcataataaaaggtataacagatgccacaagaagagtaatcacagaacccttttcagtattgacagaaactgctatccaaaatgtaatccatggtatgagcattgtcatcatggatggatttttctgtacctccacaccttgtgatgttttttctgcctctttgactgccgatgtacttccaaaaaatttatcccagtttaccatcaaggaaaaatcacctgtcaccgtatacatctgctttcccaatgcctctgcgccacctatctcgcctcgggaaatagccgaccataccgtaaaaggcgtatctatgcgtgtagtcgcggcaaggctttggtcagtaatcacctcactacctttatcatcaagctttatttggtatgtatgcttcaaatcggtatagcatatctcaagcacgcgttcctttccgtcataggtatccttattgtataatgcagccatctgtctggtgaaaacaaggtcatccgcttccttttctcctgttgtcctgctgattccccagctggcatccgccatactttcaaatacatcccttggatataaaagagtatggatcgccgcttctgttttttcagatatttttcctgtgatggcatattctgccccggcactttttaccgtagctagatattcgtcagtcctctttgacagctcttttacacgaaacagctcaccctgaccacaaaatatggttgtataatgcccttttccaaggaaatggtcaaacatccgaaatacactgtcataatttccctctgcagaataaaagccacaggtagagattagcacatgccttttgccttccatgtcatatctgcaatcatggctgccgcttccgtatccgtcatcctttgtactcataaacggcaggctcatgggaagctgcctgtcaatcacgttctttagtattcccggcacactaaaatagtacagaggaaacgaccacacaacaatatccgcttcaagcattttccctataacagtctgcatatcgtcatttatgcagcacacccccggtgtcttctgccagcatgcaaagcagcccttacacgctcctacattcattgaggctacatgcatttcatcaatggatatagcttcatttttgctcttatatccttctttgaagccttctataaagctgtttgcaagccttaacgaattgcttcgtttgccttttggacttccgttaatcagaagtatgttcatgctttatgccctcctgtaagtatatagttaattttagtatagcggattgacaggcaaaaaacaattaagtttggacttagaaacaataccataattatacattcaaaatacattcaaattcttaagcatgccttgtaattatagtactatgatagtaaaatagagttatattatttcaaatcaggagaattcatatgggttacgatgaaaaaatttttaaagcaaaggcgaatatcaaggcccgcagattatggcttgtttttgctatattgctgaccgcaaattatggtaccgacacagcaaatggtgcttattccatcaataattatatcatttttgttattttatgctggctgcctttcgtgtgtggtgacatacttctaaaaaagaaggggaaggataatgatcattacaggcttgcatttgtcatcggatatggtattttttacgtatttcttttgtgtacgacaacctcaccgattgcatttacctacatacttccgataatcagccttattgtaatatttaaggatgaaaaattcatgatttactgcgctgttgcaaatatgctaagccttattgcaagtattgcatttcacatatttgtgctgggtcagaacactgctatagatcataaaaactatcagcttcagatagcatgtcttttactttgctacataggctatatcatgtcggtgcgtcacctgactgagtccgatgctgcactcaccgaaagtataaagtctgatttgaatcgcgttgtcacgacagttgagcaggttaaaaccgcttgcaacactataatggacggtataaccgtggtccgtgagcttgcttctgaaaacaagcatggctcagatgttgtcgttgagagaatgaatgagcttaccggaaataacaagcagcttcagtcccacactgcttcttcccaggaaatgactaccgatataagctcacaggttgagaatgttgcagccatgataaatgatatggtttccctgacaaccgaatcaggcaagcatgccaaggtcagctctgaggaccttgaaggtcttgcccagacagcaaaaaccatgtcagagctttctacagaggttgaaagcatcctgactacattcagagatgaatttgagatggttaaaaatgaaaccggaacaattgataatatttcaaaccagacaaacctcctcgctcttaacgcttctatcgaggctgcacgtgcaggtgaagcaggtaagggctttgctgttgttgctgaacagatccgtactttaagcactgagacgagaaattcatccggtcagatcagtgaagctctctcacggcttgacgagatttccggaaagatgacctcatccattgaagaaacgctccgtctcatccagctcactcttgaaaaggtaatgcagaccggtgaaaatgtagagaagatcacaaaggattccaataagctcggaagccatatccatgaaatcgatgccgcaatgcaggaggttgaagcatctaaccagcagcttgtcgacaatatggaaaaggtatctgacatcgtagaaaccatgacctcatgtatcgatgcctctgacgcgataagccgcaagatgctcagtaaatatgatgaaagtgcaacaaatatcaataatatcgagactgttatccaatctctcatgcacgagctcggagttggtggatttatgggacttgatgatatccgcccgggtatgaaggccaaagtgatcctgacagatgtacagaccgacaacgagttccattgcgaagtaaaggctgttggcgaaaacagtcttaagcttgtatcaggcggcttatctgtagactcatccagaccttgcaatctgtatgttacagttggcaatgtaatgtactgctggaaggatctcacaatcacagatgaacttgtgataacagtcaatacacagcctgaaatcttgaaccgtaggaaatatcctcgcatggatttatcaaacaattgcactatcaagcttaaaggaaccgacaccacattcaaaggaactcttgacaatataagtgcaaacggctttgcattttttacaaaggatccttatttcgtggatcataaaggagcgaaggtcactatctcgatagaggactttgcgcttgctgaccactcagtattggagggatatgtaatccgctgctcaaataatgagggaacatatatcgtcggctgccagatgcctgaggataattattatatccagacatatgtcaatgaacagcttcgtgctcactcataaaaataaaagctatgaaagcctttaaccgggctctcatagcttttttgattgataatcttctatcctattatcttctatctattatctttatcttctatctgcatgatgtttttccttctctgcatacatccggctgtctgctatctttagcaggctctcaaccgtgtcagcatcggacggataaagtacatatccacagcttactccgatttttattttatgaccatgtatgttatatggattgcatataactctttgaagcctctctatgccctctaagcaatttttttcatctgcatttccatctattatacatgcaaactcatcgcctccaatacggaatgcataatcagctgttcgtatgctgtttataatgcgctttcctacattacaaaggacctcatctccgaccggatgaccatatatatcattgaccggcttgaaaaaatcaagatccataaaaatcattgcaaatgcttttcctctctggactctcatatatacattgtagctgtgaatgctgaatattatgatacctagcaatgcacaggttatcacaattgtacggatgttcttcttttttataatcataaatgtgttctctccataccttagtacctacatcgtatctgtgcttcgttctctattcatatcacatatacttgtatttctggtactaattatacaacatatagtgcctaaaatctatactctcggcgcgaaatgtagtttttatggtgtgaaatgcagattggcaataaaaaacaagggaaagtattaaatactttcccttgtaaaatcttacatatagacttttaaattagaacctttgtctattttgcctgctctgcgatagcagcctgtgctgcagcaagacgagcgattggtacacggaatggtgaacatgaaacatagtcaagtccaatcttgtggcagaactcaactgatgaaggatctccaccgtgctctccacagataccaacgtgaaggttaggattaactggctttccaagcttaatagctgtctccattaatttaccaacacctgtctggtcaagcttagcaaatggatcgttctcgaagatcttgttgtcatagtaagcgttaaggaacttacctgcatcatcacgagagaatccgaatgtcatctgtgtaaggtcgtttgtaccgaagcagaagaaatcagcctctgtagcgatctcatcagctgtaagagcagctcttggaatctcgatcattgtacctacatggtacttgatgtcagcatttgcagcagcgatctcagcgtcagctgtctcaaccacaatcttcttaacgaacttaagctctttgatctcacatactaatgggatcatgatctcaggctcgatatcccagtctggatgagctttctttacattgatagctgcacggataacagcctttgtctgcatcttagcaatctcaggatatgtaactgcaagacggcatcctctgtgacccatcattgggttgaactcatggagtgactcacagatagctttgatttcctctactgacttgttcttagcctttgcaagcttctcaatgtcagcctcctctgtaggaacgaactcatgaagaggtggatcaaggaaacgaattgttactggacatccctcaagagcctcgtataatttctcgaaatctccctgctgatatggaagaatcttgttaagagctgtctctctctcctctactgtatcagagcagatcatctcacggaatgcagcgattctctctggatcgaagaacatatgctctgtacggcaaagtccgattccctctgcaccaagctcacgagccttcttagcatctgcaggagtatctgcatttgtacgaaccttaagtcttctgaactcatcagcccatgccataacacgtccgaactcaccagcgattgaagcatcaactgttgggatgattccagcgtagatgttacctgttgtaccatcgatagaaatctcagatccctctgtgaatgtctgtcctgcaagtgtgaacttcttgttctcctcgtccatattgatatcaccacaaccagatacacagcatgttcccataccacgtgcaactacggctgcgtgagatgtcataccaccacgaactgtaaggataccctgagcagccttcattcctgtgatgtcctctggagatgtctcaagacgtacaagtacgactttctctcctctttcagcccatgcctcagcatcgtcagctgtgaatacaaccttaccacaagcagctcccggagatgctccaagaccctttccaagtggagttgcagccttaagtgcagcagcatcgaactgtggatgtaataatgtatcaaggttacgagggtcgatcattgcaacagcctcagctggtgtcttatgtccctcatctactaaatcgcaagcgatcttaagagcagctggagctgttctcttaccattacggcactgaagcatatagagcttcttgttctcaactgtgaactccatatcctgcatatcatggtagtgattctcaagagtctcacaaaccttaaggaactcagcgtatgcctctgggaactcctgctccatctgagcgattggcattggagtacgaacaccggcaacaacgtcctcaccctgtgcattgataaggaactcacccataagcttgttctcaccagttgcaggatcacgtgtgaatgcaacacctgtacctgactcgttatttaagttaccgaataccattggcattacgttaacagctgttccccatgaataagggatatcgttatctcttctataaacatttgcacgtgggttgtcccatgaacggaatacagcctcgatagcaagctttaactgctctacaggatctgaagggaaatctgatcctaactgattcttgtactcagccttgaactgctctgctaactctttgaggtcagctgctgtaaggtctacgtcaaatttaacacctctgtcctctttcatcttgtcgatgagctgctcgaagtacttctttcctacttccataacaacgtctgagaacatctgaatgaaacgtctgtatgaatcatatacgaaacgctcgaatgctggatctgggttaccagcgatcatagctgcaacaacatcatcattaagaccaaggttaaggattgtatccatcatacccggcattgaagctctggcacctgaacgaacagatacgagaagaggattcttaaggtcaccgaatttctttccgttaacctcttccatccattttacaccttccatagtctgagccataatctcatcattgatcttacgtccatcctcgtagtactgtgtacaagcctcagtagtgattgtgaagccctgtggtacaggaagtccaatctctgtcatctcagcgaggttagcacccttaccaccgagaagattacgcatggtcatgttaccctctttgaaggtatatacccacttgtttgccattttgcaattcctcctaaattttatttctggtatggtaaaaaaaaccatccatatacttgattaatgtgtgcactcatacaagcgcacacattaataataccataatttcagcaaatatcaactaatttttattatcttttcccttatgtttcatactatttttttgaacacggacagacttaacattctttactatgacaaatatcataattgcaagaattgcagctatcccaagcgcaccaatagccagcggaacaaccattccactctcactaatcatggtggcaagcggtacctgctcatctgctatatcatgcttattgtcgtttgccgcctgcggtacctgctcatctgctatatcagtatttggctgtgcctgcggtgcctggattccatcctgcggatcattctgtccgtcaggcactattgtgtttgcggcatttgctccatctgcagctccgttatttgccactcctgctgcattgcccgctgcattagctgccccggctgcatttgcagctcctgcggctgcctgattgccgcctgccgcagtattgtcatttgctccatttccggcagcagccatgcttgatgcagcccttgaatatacaaaattgaacacgttttctgacgcatttgacgacagctttcctgtctgattatagctgtccggaatatatccatctatatacagataagctataaccggctcatcgcccacattaccataataggtacggctttctgcaagcttattgccatctgtatccacatagttgactgtatactcagcaagctcgcccggtatgccgtatgcaacaacatagtcctgatctcccgatacgagaaaagccgactgtgcaactgtattattgtcacggccgcttaatctgattccctttacgtagtacttgctgttttcattaagtgccacactgccctgtgcatcacagctgatgacatctccatattcaagacctgtgacaattattttgtctcctttagcagaaacagaaaccgaagcctcattgcctgatgccttgcgcacctgcacaccaccgtttatgcttccctgacctccggctgagaaggaaacagtgtatgtatatgaaaatgcctttgcatctgctgtctgtgagaaaacaccggttatgacaacaagagctgcaagaaaatatttaagcaatcttttcattttgcttagccccctttctgtcacttacgaaagccagtatcatcaaaataataccaatcacaaacactacagctgacgctattgaccagatatctccggtctttaccttgcttgttgtagttataaatgtaggtggatttgataaagttggatcagagttatcctctaccgcaaagttcatcataagctttgcgagtgtatcctgatatatattaccctgactttctccgtcaagccctactaaaagcttcacactgcctccctctccaggctctaatgtctttaaataaaagaacttatccagagagtttgtagcctcattgagtccttttccggctgttgcctccttctcaccacctacgctggtgctgctgtatatagtgtcctcttttccatccggtcctacgaaagtaagaatatatgagtatccaccattttcagccacagtctgtgtatcctcaagactctttaatacatcattggacatataccatttcgtcgaaatactgctgttattctttatatcaacggaaaatgtgacagaatctccgggctccatctgtgagacagaggctgctattttatttgaatcgaacgaactgaccatctccttgccggtaaactcacatgagccggctgtagtagtattctcatctgcaaatacagtgcctatcgaaccaaggataaacaacatgcatgataataatgcgataaattttttcatattgtcctcctttactctaagctaagtgccccgtcatctgatatatttacatcaacaccccacgcactcttaattgcgtcctttgcattgtgtgtctgtactgcatcaacagttgcctccagcacaaattgcgcaccatcatattcataggtagtagtgatggttgtaagtccgttatcatcagtctgtgatgtctgacccacattggctgcaatatcgccggatatactgattttgtctgtaaaatcagtggatgtctgacctttttttaaaatagtattgtagtaaaatacatttcgctctgtagtctcagcactcttatcctctgtccagccatcgtttgtaaagtcaatctgtatctttgatggatcaagttttgaaagcttatcacctgtctccttatctgcccagtaatgctgcacagtcactctcacatactcatctatcgagccgctgtttttgacagcaagcctctcatcgtactttttgtcgagaatcagcttttcatctccggcattttctaacatatcgccaagcagcactcctgttgcctcgctccagtcatcatccttatgcttataatcacgccagctcacatcattgccattctcagttaaagtgacaccgatggatttgatgtcaatctgagccagataattatcactcatatatgtaagagttgcttttgtagatcctatcgtcgatgctgcaagcattattgcagaggatgctacaagtataagtggaagttttctcttcattactcttcgccctcctctttatcatactgtgctgtcgcatcccattttgcatcaggtgcgacacacggattgccattttcatcatatgtgacaggagcacactcctgaaccacaactacattaaagctggtctttaccttttcactaactgtgatagctgcaacaattggctcggttttaccaccaaccggcactacctgactgtaataccagtagccatcatctgaaaggctccagtttgagcctgatgcctgtatatcaaactggctcgctgcaattacctttaccctgacaaaacagtctgcttttcctgtattctcaatctcaatagttttcttccagtccttaaacttctccttgacatcagttgtaggaccgatatctactgagataccgccctttgccgtagcataggttgtaaaatatgccagtgtcggtttaactgaaacaccacagacaatgagtgttgcagcaaaggctgcacatataagaatacggtgatttctattaagttttttacaagactctgataattttttcattaattctgcacccattcccatccggttccgtcatactcaaaatggtttacgacaccggtactataaatcaatttgtcgttgtaatcgtttgtgaaatcaacatctgcggtctcaccggccacaatctgtgtctctatgctgtctgaggaggtcacctgataactgccagcggcatatacctcctttactatcacccttgaccctgccggaatattgtcaataactacgctcttagcccctgtactgtcaaatctgattgatgcgatatcggaaaacaccacattaccatccctgtcgtaggcctcaacatcaaatgcaaacaccggctcaccgagtgctgtattgtatgtctttaatgtcttattaatctgtaagcttcccataagcccggtctgttcaggcttcagctcgatatcgatatcatcatatatccatgaatctgagccgcttcctgtcatagcaaactcattattcggagccgaaatcagatacggcacaaatgtgtatccaaatcttgccgaatcagccggctttgcatacaccagatacagtcccgtcttaacgcctgtgacgtttccccttccgtttgaaacatctattgcctcatctgctgtcaaagaacctttgtctgcaatgtccgcagctgtctttgccatcttttcccagtcatctgcggtagttttactgctgatatctgatatagatttagccagctcatcaaactgcttcgttgcagtgtatacatcgttctcatctacatctgccactctgtaaagctctacgggaaaatccacagtatacaaatcctcccatgtatcagggatatcaactgttatagagcatttcttatcaatatcaatatgcgtccttgcaaaaatgcttccacatggcagagaaaacaaggctatcgctgctatagctatactgacagctctttttaaactattgtgcatttttcctccttcctgattctatctgaatctatacaatatcgttttactaagtatcttacaaattataatatacaaaaccagaaacagaatgccaagcactatggcttcatgtaacggctgtacctgctttacatcctcgacaataagtccctgtgcatcatttgcaatcctgtgccccctgataagaagcctgtgtgaattcacaccatacggtgtacatgtgataagtgtacagtaatcctgaccttcctcaatctttaagtcattaagctcatcaggcaaaacaatccttatctgatcaacctcgtaggtcagtgtctcgccaagcacatacagcttaaatgtgtccccctccgccatctggtcaatatccgtaaatagcttagacgacgtaagtcccctgtgtcctgaaacagcacaatgtgtgcttgctccgccaaccggaagcgatgtgccctcaatatggccaacacctatctgaagtattgtattgtctgtgccgtggtaaatcggcaatgagacattgatggacggaatctcaacatagcccatgactcctgtgccagatacatcaagaagactttcatactctgctttatcctgatctgacatttcataacgatcctgcttacttaaaagcttctcattatatgcctgtgcagcttttcgcatctcatcaagcttttgctcatccgtgttgtctaccgcatcaacgtagcttgcaatggctctggactgatgaaatgaattccaataatcacttactgtcggatatagcagtaaggacaaccctgcgataaacactacgccaaaaagaatagtagataaacgtcttttcatagtgctctccttactgttacataaactctaaataaaatctattatagctgccacagatttataacctgtggcagcataatatttaaaactaaatagtgccagtcagatattaattatctaacacgcttctttgttacaagaacaattccaccaccgataactaagatagcaccaattacgtagattgctacacgtccggcaccaccagttgaaggaagaactgaacccttgttgtttactacatttgtagataactcacccttatcaagcttaacacctaaatcaataattgaaccagatgctacatctcctgtaagatctgtaagcgttggattatcactagactcgtcatgctttgcagaaattgtaaatgtctgatcctcgattgagttgtatccgtcaggtgtctttgtctcgcgtaatacgtatgtaccatcatctaagcctgtgaatccgaatactgttccctctgtattagtagaaagaatcttcttaacctctacaagcttaagctcctcttgtccgtcaacctttactttcttgaaaagtgagaactctgcacctgtaagtggcttattatctttgtcaaccttgtttacagttaacttgtaagtaaatacgataaccttgtcttcaggagtcgtacctctgtctccctcaccaccattgttagggttgttagagaacttaagactaactttatttgggtttccggctgcgccgattaccgcattctcgttaagctttgctgtatactcaacaacaatctgatctgagtttttagcgccaaatgctaagatattgtcacatgtaaatgtaagtgtcttagctgttgcatcatagctaggtgtgaaataatctgtaacatccttctcacctaatttaattactgcatcattgttgtagtcaagtccttttgaaagagtatcatcaaactcgagagagtatgccttgtagctttcaatgttgtttgctaatgtagctgtgagctggaatggaacatcatctccgatatcgtaatcggctgaatcctgccaatctgttgtcacgcctgttgtgtcgtttgtatccttaaccttcttctctacagaaggaacatctgcctttacatttgcaactacatcatctgtaatatgaagaatgaactctgtgtaagattcctgaccctgtaaagaattatcctgatctttgataaggtagtaacctggcttaaggttgctgattacattctttgcatccggatctgttactgtaactgagcctgatgctgatgctaagtttgcaccaataatctgcgcctgctctttaagctctgaagagttgttaccaaaaccaccgagtttttcagcataactagcagcatcaccgccgagagcagtctgtcctgcttctgtaatgccctctccccactttatgttagaaagagttgctttatctgctgataaatcaccagataaaatctgataagcctcataagtgtgtcctttgacagccttgttaagtgtaagactgaatgtgttttgatctgcgtttggtgctgcaaatacagttacactcattgcaagtgtaagaatcatagcaagcactaatgcaatgcttcgtttgattgttttcatttcgcattctcctttttttataatactttttgttttttatagaaaagtgttattgtagctatcgcaataagcacaactccacttaacatatacaaccatctgttaccgcttccacctgtttcaggaagcttatactcattgagcttatttgtaatctcaatagtacctgagtcaacagccatattctttcccggtgccacattggcatcagttctgttaatcactgttccatctgtattcttaaatacataagaaacatcatagcctgacatactgttgttctgatttattccaacctctgtaacataatacttataggtttcgcctgttatatgacctatattatctgtctttttcgtaggaaggtctttgaatttataagaccagtttccatctttatccggtgtcacttctacggtatcaccgtatttatcatcatttcctgatgaatccacccgatgtaactgtaaataaatacttccatctgtcttatttataggtttgttattggaatcaacccaatttttttcaacagaaatttctgttgttggaatagtctcatcaccgatatatactatatcataattgtttgccagacattttcctgttaagctgttatttggagctgccacaggatatttatctttatccagcgaactaaagtagaaatatgttttttccggttcttctggaagaacatagccactaggagcctttgtctcaacaacataatactgtgtgttatatgtcattgaatttttattaaagacaatctctatcttacctttatcatcggtaacatatttattaacatagacatatccttctggtgttttcgtagtatctgtactgtttggatcatatttgtaaacatcaaactctgcattcggcaataactttccgttatttccctcttctgtcttataaagaataaacgaattattcttatatacataaaacgaagaataagatttagtgtactctaattgagtgttaatatctgttttactattatcaacaccttccagtgaaacggcattagatacattaaatttaggttttgaatcattatactcctgtagcaaatcaccctttacactataagtgtatgtcaacattatagcttttccatcagggacaatagcatttattgttttgcttgaatactcccattcatttgatgcttcctgtgaatcatatgtccatttacagtcagatatcacctcaccaggtttgtatgttccatcgtcctgcttgatagcctctctgaacttaactgtaccaggcatcaaatccacctgccagcttaccctagcattttcataagttatttttttgtacgacaaaacatcttttaaatttaatggcctaccaccatccagatatgtcttgccctccggatttataagaacagtataattcaacttatgttcatcatcattccagcttccgtttttgcttataactttatctcctgaatccggaatattttcattatcctgctttggttttgatattatctgtgtctggctagattcaccaatcttatcattattgtccgatttagcagaagctgtattcttgtacacaagctcctttcctgcctccagggtttcagcactatcagccttacatttgtaaacaaggaaaattttagaaccttctccccagccacgaacctctgcatcttttggcttttctacagttgtagttattacctcacgaccattgcttgtatcttttttacatgaagtattaattccctcagaatagtaatttttgccatttaaattttctactttatagctcttgccatccaatgtagggtatgtaaaaccttggtctgaattattgtattttaactttacagtaacattttgtacgctgatgccctccggcatattatcagtgattgtatatttggttgcatttttatccattgtaaccattacaatccatgtgagcgttccgtcatatcctgaatcagtggtctttacatatgtatctgctgtattgttatttccatcactcttaacaattgatgatttaatatcttttgtcgttttaaaagagtcatttgcattaacattccagaaatttacgttgttcttaaactcgagttcgccacctgctgaatagtctgcatatgatttatattttaaagttactttataaccatctttattgctattagaaggtacaaacttatctttaaactcaaacgaaaatctggtaaacttagcatccgtttcgctattaagagaataaaaatcatactcatgatcgccggattttactttaaaattatatatcgtatcgccaaaaatgttttttgccttatcaaatacatctttaacctgctgataagtcatataatgagccgtattgtctgaagtattatttgtcagttcatcaacaaaccaagcccctgcatccgctccggttgaaggaatggtaaatgtcgattcccaactgagctcatacctgttattctcagtctcttcattatgggcagtcaagttctttgtaacttttacatctctatgagttcccggaacatttactccggcccatttgctaaacgatatctctttgttattgaaattaacctgattattaacaggctggtcatagctttgtggtgtgacagatgtttcatatgtaataacatatgtactgtcatttttattatctatagccacaaagttaataccgctaatcttgccttctttgtccttttggatttcagcacctttacagtcggtatcctgttcagagcttattttaaaattctttgcatccttaaggcagttatctgtcagtacagccccaacaatatcatttctttctttattaacagtgattgtccacttgacagtctgactgtctgagtcgtatgcacctgttttatcaagatcatctctcgtgtatttaataacactgcttgatgtatcaataaccttttcattagactttttatttattgattcaccggtaaccttgttagacgcctgtgactcatttccactatcgcaaagagatgtgtcataataatacttgtattttatctggcagctttcaccggcattaagcttaggcagcgttgctgtaagattatatttatgattattattgtcattattcgaagaagccgtaacattagcagtatattcaccaccaacctgctgtccgtttttagttattgtgtaagtaaactttgatgtatcaacagacattttgccggcctccaacacatcatttaaagtaataacatccggtgtacctttttcagatgaaacatcaacaacatactcagcatatttgccattgtcatctttcttaagcgtattatctgttgtatttgactttttaacggtaatatcataattagcgctgtggttcttatcccaatggatatattccttgcttatatctaatgtagcatctccgcctatcttaacaacaacatcaccattgtccttaacttcactatagccacttgcgccaaatgtcgcaccacctttaatttcagtagtgttgctttgtatgtaatcatcagcaaatttaatcaatacagaaaatgtaccatcattgttttttataaagcgataattacaaaacttattgccgctttcgtctgtatatgaatgccagccatcacaaaccgcatcaggaatagatatatcctgtccataagtcatataataattcttaattatatttccgctttcatccttgaactcaccctcgcctatggcgaaagacatatcaaccttataattaaatgtctttccatcccattctacttcaggctgatcaccttcaagcttcaccaccggaggatttttaagcttccccagattggtatatgtttccttctgtccatccacctcgaactcgtacttgttctgatcttctgcagatgcaggttgtataagtctgtacgcagtaatgcccagcacaataacagccattgaaataataaacgtagcaagctgtctacgtcttctcactcttttaagccgttctttgccgagacgttccatatccttatccattctgcatcctcctttcatagagttatataattccatttgcttaatatcttaatcgttattttacagctaacatattacacctttttggtcacacagcggtcacacgggaccataaatctgatttttctacttttttactaaaaaaagctaaatatttttagtcaactttgccaattttagacaatggccatatggcaaatgtgactcttccgactacctgttcctctgagatacagcctatagctgtatttcttgagtcaagcgatacgcttctgttatcgcccatcacaaaaattttcgactcaggaacctgataagggagctctatattgcagtctcctaaagccttttccttcaaatacggctcgtcaattgcaatatcgtttacgtaaaccgtgccatcctctgatatattaacccagtcacccggcatcgcaataactctttttacaagtatcttgttgttgtaataaaaggctatgacatctcctgttttaaagtcatgtcccttagatgccataagcacctgcccctcttgcaatgttggtgacatggatgttccggtcacctgcaaaataggaagccacagatttgcgaccagtattgctgccgctgccactaccacaagtgttcctacggtattgaagagtgttgctgcaaatttgttgttatacttcactcttctcagttcctgacgcagctcctttatgccaagatcatcgctataacggtcatagtcgtctgtcatgatactgcgatagcccgatctatcttcagtcttctcagcacttttattctcaacttctttattctcaactctgttttcttctgaaaccttccttgatatttccttttctatatgtacagatatatcctccggccggtttccttttttagtctgctgatattccttctctatttcaatatttttttctatatcaggagttatgtctggcgccggtgttacatatttgaccggaattatttccgctatttcctgtgatatattttcatcaacattttgggtctgcttatgtacctgcgttactttttcagatgacttaacagctgtttccatcatctgtgccaaaagtaaatcaagcttatcctcattggtaagtggtttctgttcgacatccttcagctcctcgtctttgcttaaatccactacatcaatattatttttgctttctgcaacagctgcaatattgttatgattaatctctgcaactacctttttattgtattcagcatctgtgcagctttttgtcgaatttgtgaggttagctgatttattctgcttaattttcttctgttctcttttttttcttagctcaatgtactttacggcaactcttgccagagcatatattgcctttttatatattttttctatcattcttttgtccaattatccatttcataaccacaaaatattgcttctatattattttcttgtcagattatttgaagccatggatattacggcggcaaatttctggatttcctctgttgctgacgtgagtttattaattgcagcattgatatcaccagatgtctttacctcacgctcaagtgtctgaatatgtttttttgtctcgtcaagttcttttcttaagtgttcaacctctttacttctgtctaaaagcatctctagcagctcacttctgctcagcttctttaattcttttgcttccatattcataatctccatatatcagaacaaccaaagaatagcttactatatctttggttgtcatttgtcatctatattatatcataaaatttgatttctgatatgtttttatattaatttttgtgacctaattcctaattttgtataatttcacaaaatacactttcaaaaaaagttgtaattgctttttttaagcctcatttaacaaaaaatatcgttagtttgtacaaaactagaattcaaatttctttgcaaaataagcatcaagctcatcaattgcgatacgctcctgctccattgtgtcacggtcacgtactgtcacgcaatggtcttcctctgagtcgaaatcatatgtcacgcagaatggtgttccgatttcatcctgacgacgatatctctttccgattgttcctctgtcgtcatactcacaattgtatgtctttgaaagctgtgcaaataccttttcagcactctcattgagcttctttgacagtggaagtactccaatctttacaggtgcaagtgcaggatggaaatggaatactgttcttacatccggcttctccggtgtaccgatatcctcttcgtcataagctgcacaaaggaaagcgagtactacacggtcagcaccaagtgacggctcgataacgtatggcagatatttctcattcttctggtcatcgaagtatgtaagatcctgtcctgaaacttcctgatgacgtccaaggtcataatctgtacgatccgcaatgccccaaagctcgccccatccgaatgggaataagaactcgatatctgtagttccctttgaatagaaggctaactcagcaggatcatgatcacgcagtctcatctcatcctccttgattccaagggaaatgagccagtcacggcagaagcctctccagtacttaaaccactcaagatctgttccaggctcgcagaagaactcaagctccatctgctcgaactcacgtgttctgaaggtgaagttaccaggtgtaatctcgttacggaatgacttaccaacctgtccgataccgaatggaatctttttacgtgatgtacgctgtacatttttaaagtttacaaagataccctgtgctgtctcaggacgaagatatactgtattcttagcatcctctgtaacaccctggaaggtcttgaacatgaggttgaactgtctgatatctgtaaaattgtgcttgccgcatgatggacatggaacattgtgctccttgatgaaatctaccatctgctcgtttgtccagccatcaactgatgtctcaagctcaataccattgtcctgcgcaaaatcctcgatgattttgtcggctctgaatcgctcgtggcactccttacaatccataagcggatctgagaagccgccgagatgtcctgatgcaacccatgtctgaggattcatgaggatggcacagtccacacctacattataaggattctcctggataaatttcttccaccatgctctttttacgttgtttttaagctctacgcccaggtttccataatcccatgtatttgcaagacctccgtaaatttctgagcccggatatacaaatcctcttgcttttgctacctgtacgattttgtccatggtcttttccataattcttgtttcctctctatcttacttatgatttatttgtattcgtaactgttcagtaccttcacagctgtaagctgcaggcgcattagaatcagatgtactgaatagttacttgtattcttaattataattaaataacaattcacgccttaatctacttatatataacatatgtgatatatgacaccggcgccgaattgtcctcctcactgtcaaagtcaaatgtgacctcgttgtcttgcttgaccgagtttaatatatcatcatcactgacactatcatccgctccgttttccgttccttccgtcgcatcggcttttactgcttccgtgttctctgtgacactctctgtccctgtggtttgtgatgcaagcaggctgtacttgtcaccaatcgcaactgttttgtcatctacaagctttactttgtcgacagatgcatataatattttccctttcacgtgcaaatttgagctgccttcgtaaacaacgaccttgtagccggtttcatccagaaactcagatgattcacatttctttgccttgccatcatctatcgctgcgaaatcggtcttgaagtcatatccggctgccagagcctccgcaatcgtccctgaaaaaagctttgtcccattgaaatcagtatattcgtcagttgacgcatagctcatggtaagagatgccttctttttctcgacagtcagctttttgagcttgatcgaaccgtcattcttcttattgtagtcgtctattgacttgtccacatagctttgtaagtcatcctgcttgtatgcagctgtatcaaagtcctcgacatctgtagataccacactgccgttttttgcaacaaacaccgtgctgtccttggtataataatctgtaccgcacccggcaagcaaaccgcatgtcgcaataacaggcaacagcattgatagctttttattcatagctgcctcctaaaatataatctatgatattatacccttttgtatatatgatttcaagtatcatattttaaagggcaacgacatgcatagtatctattaattatttcatgatttaatttcatgctttaatttatcacagaaaagctgctgatttaaaatcatgatgcacatagattgaaagatattccttcattatgcttctcagctcctcaagcacatcgtctgacactgcaaatgtgtacagcttcgtgatatcagctgaaacaatatactgcatggtataaagtgtatcgcttagtatatgcctgccctgcacctgcgtgccacagttatcgcaaaacacccctccgcgacttgccgaaaagacattaagtccttcccttgaatgacagtgtatacacgaaaacagcgatgggccctcgccatttatcgtaatagccttaagctcaaaaacagccctgaccagctcatttttatatgccggtgattcaagagccctgagtgattgataaaggagctttaacatatccttctcgtcattgttctcctgacaaaaatatccgcagaactccagaaagtaaaacccggtgtatactgcttccaaatcctgtgtcagctccctgaaatagttgctgattgtgacctttgaaagagaatatgcgcttttaccctcaaacagctcaaactcaccgaacgaaaatggattgcttcctgccataagctggctgtttggacgtcttgccccccttgcaaaggctgtgatttttcctcgttcctttgtgagaatcgttattcttttgtcaaaatcccctaccggcatggctgaaagcaccataccggtcaacactacactctgtgacatcttaatcttactttcagaatactattcttcctctttgtatccaaagttcttgatgaggaagtcgctgtctctccaatccttctttaccttgacccatagcttcagattcactttacagtcaagcagtctttccatctcatagcgcgcattggtgccgatttttttgagcatgctgccctgctttcctataatgattcccttatgggagtctctctcgcatacaattgtggcatccatatctataatagaaccactctttgtctttcttgtcttcatgcggtcaattcctactgcaatgccatgcggcacctcgtcatttagagcatggagcgctttttccctgataatctcagcacagattgcacgctccggctgatctgtgatggtgtcctcatcatagaactgtgggccataaggcaaatacttaaatatagaattaataacatcatccgtattctgccctcttaaggctgacgtaggaataatctctgcaaagtcgtataccttgcggtaggtgtctatatactcaagcaccttttccttttccacagtatctaccttgttgataatcaatataacaggtgtattaacttttttaagctgctctatgatatgctgctctcccgccccgataaagttggtcggttccacaagccacagcacaacatccacctcatttaatgtcttttccgccacattgaccatatactcgcccagcttatttttggccttgtgtatgcccggagtatcaaggaacactatctgtcccttttccatatccgtgtatactgtctggatgcggtttcttgtggtctgaggcttgtttgaggtgatggcaattttctgaccgataagcctgttcatcagtgttgacttgcccacgtttggtctaccgattattgtaacaaaacccgatttgaaattctgtatcatttttcctcctatgtgaatctgtatttatataagcttttcaacattctcaaagagccctgccgactctttaatcatattttcattgccgatgacacatatactgtccttcttaagcactgcctctacaaggtctgcaagccttctgatatcctctggctgtgcatttagtatctcatttctctccttttgaatctgctcgtaggtaataccctcgagatatgcagacagtgatctgctaccctttgcttccggattcataggcgtatcaagagcactgaaggtaccgataatatacttggtcatatccctctcatcaggtgaaaagctctttatatactcaggtatcctgtcatagacatcaagtgtgtctgacagatttgggtctcgatatgagacaaagtagctctctccgcttctaaggaaggtattcatgcagccgtaagcaccgccctttaccctgacatttatccagagataatcatagcttaagatgatacgcagcagtctcagtgccccggtgtattcatagccctcacagatgaaatcaccggtctttgccacatactgtatctgtgatgcatcgataaatgcttcctttgctgtgttaaaatgaacctcagcctgattgcctacagcactcattttattaaatccagctataactttttccaacgaaggctttgcattaccgtatgcctcgttatttccggtaaagctgataagcattctgtttcttgcaaacagctttttggctattgcagcaagcttatctgacacactctttggtgactcggaaagttccttttctatgtggcatatagagcggtaaaaagcaactccctttagctcgtcctgataaagtgcgtagcgcgagaagctcgacatacttcgcatagctgcaaccagatgaccggaactgctaaggttagcctgaagccttgccttaatctgcgctacaagctcacccagtctctttgtatctgtaaaatccgatgaaagaagcatctgctccataagctcaagtgccttgtcaagatttttctccaataccttaagcttcacctcaaacttaaacacgaaattatttctatccttaatatccgggtgacttgcagtacctgtgctgattccgccggtatatatgttggtagcattggctaaatcggtatagctatacttttcggtgctcaccagcccgagtgcgtttgtaaagaagccaagatagccaagctcactctgagcaaaatcacctgcatcaaataaaaatgatatataatcaatgccgtttgactctatgtcatgacgcacaacctttacatccaaaagttcatcctcaatgtttgaaaaaggcatagcattctttttcatatccgctcttgtaagcatcggaagcttgcgcagatcctcgtctgacgaaggctcctcctggtatttctttaaatgctctgtatcctcaatcagctttttaatctcttcatccgaaagagatgccttataatcggaaagctcctttgccaaagcttcctccctctcattgccaaggccacgcttcggctttactgtgacagatgaaccatgggtattgtcaagcagatactcctgtataagcttttcaaaataatcagtatctacagccttccgaagctttgcaaaggtaccaagacactccagatgtataaaaggcttcatatcatcaaacagccagctgtctaagcaatttaatccaaaaagaagtcccttagggaactgtccgaagtcagcctccctgaatttgaactcgctgctgttgattcccgcgagcaatgcttctttattaattcctgttttaacaacctctttaagagtgttttctataatactttcaaactcatctgcctgagatgcattggcattttttgccacaaacgagaataccggctgcagaatgcccgcatcatatgagccatacacatcatcaccgattcccgcatctatcaatgcctgcttcacaggtgctcccggtgagctgacaagtgcatagtcaagcacatcaaatgcctgatagagcatctcatcaagcgtatcccctaccacacggttataagatagataggtcttattctcctgtgaatcatccatggtaattgaatactgtgcctcaacattctttatttcatcaaatgcaggctgtttattaatttctgaattaacttttttataatcatacaggctcagatattccctatccagccactcaagtctctcgacaacatccatatcaccatacagataaatgtatgaattggatggatgataatacttgtgatagaagtccagatatgcttcatacgtaagcttaggaatatactccggattaccgccagaatccttgctgtaggtattgtccggaaacagtgagcggtaaatctggcttgaaagcacctcatccggcgatgagtatgctcccttcatctcattgtacaccactccatttatcttaagctcgtcatccttgcctgtaagctcgtagtgccagccctcctgcttgaaaatctcctcgtactttgtgatattcggattaaacactgcatccagatacacatccatgagattcttaaaatcctgatcattgcagctggcaacaggataaactgtcttgtcagggtatgtcatggcatttaaaaatgtattgagtgagccctttgccagctcaataaaaggatcctttacagggaacttctttgaaccgcagagtgttgtatgctcaataatatgcggcacacccgtctcatcctccggcggagtcctgaagcctatataaaagaccttgttatcatcattatttgataaaatggcaatccttgcaccactttttttatgtctcagaatgaatccgtccgactggacatcctccactctgtgctcatctaaaatctcatattcagccaaatcgtgaattgtcatcaattattcctcctaaaatgcgatgatgatagtataccacatttttacatattatagttaaattataagtatatttaccacaaaaaatctgttaaagtaatattctgcaatatccggctttaaaagtcagagtctatgctcctcttttgaatattaacatccatctgcggaaacggaatttcgatattatttttatcaaatgctgttttaatttcttctgtaagctgccattttgtgttccagtaatcctcgttcttcacccagattctcgcaccgagctctattgccgaatcctgcagctcactcacaaacacattgctcggctcatcgcgaagcatcgcatctgctgatgtgacaacagattccagcacactctttgcaaatgctaaatctgtgctgtaggatactgttactctcaaatcaagcatcctcttatccatcatagatacatttgtgatacacgaatcagcgagctttccgtttggtatcataaccatcttgttatctattgtcaaaagccttgtataaaacagatttatatcctttacagtgccctctgtaccacttgaaccgtcaactatgtaatcgcccacaccaaacggcttcatcaaaagaataagcacgcctcctgcaaaatttgacaggctgccctgcaatgccatacctacagtaagtccggcagagccaagaaccgctataacagagccggtcgccactccaaagcccgaaagcagtgccatgacaaggataaaatacaaaaagtatttaataacatttgctagaaatgatgccactgcagcatccattctgcttttatcaaatccttttttaattatttttacgactgatttaatcaccttaatacctataagcagtatcactatcgcaacaacaagctgcacgagaaagctgataagcgatggcatatacttctccagatatgtctttacaatgcccgggttttcaataacctgctgtacctcggtatttgcaaccggcactgatacttcaccaagaatttgtctaatcatataatctcctatatatctcttatatttctatttcttatatatctatttcttatatatcttatagctcttatatattttctatatatttccttataacccactaaatcccccatataaaatatgggggatcagtatttaaatcaaatattaattcactatttaataactctcactctgagcactccgtcaatggcagaaagcttctcaacggtagaagcatcaatagctgaatcaagatcaagaagtgaatatgcatagtcacccttgcccttgtttgtcagatcagatacattgatatcagcctctgcaagagctgttgtaatctgtccaatcatacccttaacattcttgtgaaggattccgactctgcctgaagctgtgcatgcacccatgctgcagtcagggaagttgactgaatgaacaatattaccattctctaagtaatctctcagctccttgacagccataactgcacaattgtcctctgactctgctgtagatgctccaagatgaggtgttacgatgcaaccctttgctccaacagttgtgttgttagggaaatctgaaacgtacttcttaacctttcccttggcaagtgcatctaccatagcctcttcgtcaacgagaagatctctggcaaagtttaatacgatagcggttggcttcatcattgcaatagcatcagcgtttatcatcttctttgttgaatcaagaagaggtacatggattgtgatgacatcacagttcttgtagatgtcctcaacattgctgatatgcttaacgcttcttgaaagattccatgcggcatttactgagatgtatggatcatatccgtaaacatccatgcccatatgtactgcagcatttgcaacaagtacaccgatggctccaagtccgataacaccgagcttcttgcctgaaatctctgttcctgcaaagttctttttctgcttctcggctgtcttcgcaatattctcatcgttctggtttgcaagacaccagtcgatacctccaacgatatctcttgatgcataaagcattccggcaaacacaagctccttaacaccatttgcattggctcccggtgtgttgaatacaacgattccctgctctgcacacttgtcaagcggaatattgtttactcctgctcctgctcttgccacagcaagcaccttgtcaccaagctccatgtcatgcatagcggcacttcttacaagtgctgcatctgcatccttaatatcatcaacctttttataatcgtcagagaacaggtcaaggcctactcctgcgattgggtttaagcatgtgtaattgaacattatgcattctcctcctcaaacttcttcataaactctacaagcttctcaacgccctcttttggcatagcattgtagatagatgctctcattccgccaactgtacggtgtcccttaaggtttacaaatccggctgcagttgcctcctttacaaacttggcatcaagctctgcatctcctgttacaaacggaacattcatgagtgatctgtcctcttttcttactgttcccttaaagagcttgctctgatcaaggaaatcgtagagaatcttggccttctcctcatttctctccttcataactgaaagaccgcccatcttcttgagccatttgaataccttgccacagatatagatgccgtagcatggtggtgtattgtaaagagaatcattatcggcctgagtcttccacttgagcatggttggtgtgcccggtagacaatcatctgtgataaggtcctctctgataattgctataactactccggcaggtcctacattcttctgtactccgccatagataacagcatattttgatacatctacaggctctgataagaagcatgaagatacatcagctacaaggttctttccctttgtgtttggaagcttcttgtactttgttccgtagatagtattgttctcgcagatgtatacataatccatatcatctgtgattggtaaatctgagcagtcaggtatgtatgagaaggtctcatctgcagacgaagcaagctctacggcgtctccgtaaatcttagcctcggcaaacgcctttttagcccactgacctgtaataatgtatcctgcttttttatttttcataaggttcatcggtacctcagcgaagaactgtgaagcaccaccctgaaggaaaagtaccttgtaattgtcaggtatattcataagctcgcggagatctttctcggcatccttgatgatgtcatcaaaccatttagatctgtggctcatctccataaccgacattccgcttcccttataatccatcatctctgctgctgcttcctgcaatacctcctcaggtaaaactgcaggtcctgctgaaaaattgtaaactctactcactctaatttcctccttgtgtcgcattgtagtcctcttcatcgaaagactcgttgataggcttgcccggtgcaaccataggccataccttgtcatctgaatcaatgatacaatcgatgacaaacggtgtcttgctctttaaggcatctgcaaatgctttttcaaattcttcctgggtcttaacacgtcgtgcggtggctcccattgcttctgaaagctttacataatccaccccatcatcaagtacggttgccgagtaatgcttctcgtaaaaaagagtctgccactggcgtaccattccaagtacatggttgtttattataacctcgataagaggaagcttttctcttgaagctgttgcaagctcgttcatgttcattctgaagcatccgtcacctgcaatattgactacagtcctgtcaggattagctgtctgggcaccgattgcagcaccgagaccgtatcccatggtaccaagacctcctgatgtaagaagtgttcttggcttgctgtatttgtaatactgggctgcccacatctgatgctggccgacctcagtaaccattatagcatttccttttgtcatttcatagattttttcaataacaaatggtccgctaagtccctccttgtgatatgtaagaggaaaagtctttgcatatgcaagcacatgctcaacccatgaattgtggtcaagctgtgtgagctttttgttgatgcgtgtaagtatttccttcacatcgcctataacactcgatgtaacacggatatttttattaatctctgctgcatctacatcaaactgtaatatcttggcctggtctgcaaactttttaggattgccaagcactctgtccgaaaaacgtgtaccaactgcaatcaaaaggtcgcactctgaaaccccaaggtttgaggtctttgtgccgtgcataccaagcatgcctgtatagttatcacttgtgccgtcatatgcacccttgcccatgagcgtatcgcaaaccggtgcattcaccttgtctacaaactccttaagctctttgcttgctcctgagagaaccactccgcctccaacaaatatatatggctttttggatgcttttatgagttcaattgcattatcaatgtcactgtctgtaattgtttctgtcacacgctcaggaagctttatctcctgcttggtgtactctaccagctctgccgtaacattctttggaatatccacaagtacaggacccggtctgccttttcttgctatgtcaaaggctctgcgtattgtatccgcaagcttctctacatcctttacaataaagctgtatttggttacaggcgttgtaattccggcgatatctatctcctgaaagctgtcctttccaagtaacgagactccgacattacatgtgattgcgacgattggaatcgaatccatgtatgctgtcgaaattcctgtgaccagatttgtcgcacccggtccgcttgtagccagacagacgccaacctttccggtgcttctcgcatagccgtcagccgcatggcttgctccctgctcatgtgaggtcagcacatgcttaatctccggatgcttgtagagctcgtcatagacattaaggatggctcctcccggataaccgaatactgtgtcaacaccctgttcttttaagcattctataataacctgtgatcctgttaactgcatcttgtattcctctttttcttatacgaatcctttacgataataggtaaaagccttattcgtactgaattttctatcaaaatatatactacgcgttctgctcgcccggaagtgcaaggatggctcctctgtttcctgatgtaacaagtgctgcgtatctcttcaaatagcctgttgtaaccttcggctctctaggctgccactttgccttacgctcagcaagcacctcatctgacacgtcaagctcaagcttcatgtttggaatatcaatctttatgatatctccctcttcaaccagggcaatcggtccgcctactgcggcctcaggtgaaacatgacctattgaagctcctcttgaagctcctgaaaaacgtccgtctgtgatgagtgctacagagcttccaagtcccattccggcaatagcggatgtagggttaagcatctctctcattccagggccgccctttggtccctcgtatctgatgacaaccacatcaccctctacgatcttgccgccctttattgctgcaattgcatcttcctcacagtcaaatactcttgcaggtccctcatgaaccatcatctcatcgacaactgctgaacgctttactacagagccgtccggagccagatttcctttaagcactgcaagtcctccggtctttgaatatggattgtctaccggtctgatgacctcagggtctctattgactgcattctttatattctctccaactgtctttcctgtaacggtcatacagtctgtatttaaaagtccgatatcagcaagctctttcatgacagcccacacaccgccggcctcatttaagtcctccatatatgtagggcctgctggggcaagatggcagagatttggtgtcctctcactgattggatttgcaaagctgatatcaaaatcaaagcctatctcatgagcgatagccggaagatgaagcatagagtttgtagagcagccgagtgccatatcaactgtgagtgcgttcattattgcatcctttgtgatgatatctctcgccttgatgcccttgttgtacatatccataacagccattccggcatgctttgcaagacggatacgctctgaatatacagcaggtattgttccgtttccgcgaagtcccataccgagcgcctctgtaagacagttcatagagttggctgtgtacattccagagcatgaaccgcaggtaggacataccttgttctcatactcacatacatcatcctcagtcatagtaccagcagcgtatgagccgacagcctcaaacatcgatgaaagacttctctttctgccctttacgtggcctgcgagcattggtccgcctgatacaaatactgtaggcagattaagacgtgcagccgccatcagaagtcccggcacgttcttgtcacagtttgggaccattacaagtgcatcaaactgatgagcgattgccatacactctgtagaatctgcaatcagatctcttgtgacaagggaatatttcatacccacatgtcccattgcaataccatcgcagactgcgattgcaggaaatactacaggcactcctcctgcctctgcaactccaagctttacagcctcaacgattttgtctatattcatatggcccggaacaatctcattgaatgagcttacgattcctaccataggctttttcatttcctccggtgtaaaaccaagagcattaaataaacttcttgccggtgcctgctgcattccggctcttgcgttatcacttatcatattttatctccttatttatctccgactatttctttgagtgcttcatcattactactgtatactcaacgatctgcttatctataacctgttagctgtctattataggtcatgcagctacacacgttctgcgatgagatcccccatctgtgctgtgcctacctgtgtgataccctctgtagtctcacccggctgtggcatgatgtcgattgtcctgtaaccctccttaagcacctgctttacagcatcctcgattgcctgtgcttccttgtccagatcaaatgaatagcgaagcatcatggctgctgaaaggattgttgcgatagggtttgcaatgccctttcctgcgatatcaggagcagatccgccacttggctcgtaaagtccgaactttgtatcgttaaggcttgctgatgaaagcataccgattgagcctgtcaccatacttgcttcatccgataaaatatcgccaaacatattctctgtaaggataacatcaaactgcttaggatcctttacaagctgcattgcacagttatcaacaagcatatgctcgtatgtaacctccggataatccttagcgacctcctcgacgatctttctccataatctggaagaatcaagcacatttgccttgtctacggatgtgacctttttccttctcttcatggctatatcgaagccccgctttgcgattcttctgatttcattctcattgtatgtcagtgtatctgtggccgtaacaactccatccacctcttttgtctctctggctccgaagtaaagacctcctgtaagctcacgcataatcatcatatcaaagccgtctccgatgatatcgctacggagcggacatgctgcagcaagctccttgtacaggtatgccggtctaagatttgcaaacagattgagcgactttctaagctttaaaagtcctgcctccggacgaagctcaggtgccagcttgtaccatggtgatgtggctgtgttgccaccgatagaacccatcagcaccgcatctgaatcaagtgcagtcgcaatagcctcatctgtaagaggaacacctgtagcatcaattgagcagccacccataaggatgtctgtgtagttgaagctgtgtccatacttgtctgctattttgtccaataccttttttgcctcagtgactatctccggtccgattccgtctccggaaattacaccaactttatattccataatttcttacctcttttacataaaaatacatattcttatattaaagcattaaagtagttatttcaatatgccgggatattttactttttcatgcaatttataactgcagcttataataactgcatactataataacagttttttattattattgcaagagatgcggataataagaaaaccgccacttatgtgacggctttacaaatctgcattatttagctgaatcctctgctttctcaaggtcagcgatagctgacttctgcattggaatacggcagttcttgttgttaccaaactcaacgattacagtatcgtcctcgatatcgataactgtaccgtaaaatccacttgttgtaagaactgtgtctcctgttgcaacttcattaagcataagctcctttttcttctgctccttcttctgtggacggatcataagaaaatacataactgcgaaaagtactactaaccagacaaccattccaattgttcctgctgcctgaccatttgctaaaattgatgtcatcaattgttcctcctaaatattctataattgatgtgttttaagcactattaccataatacacgttaaacgtgctaacggcaaggattttttatcattttcgagattttttatatttatctgctagctctgctctccctgtgtcattccatagagcttttcagccttgtatgaggcaaaacggcctgcatcaagtgaatcccttatctcctccatcatgttgttgtagaaatacaaattatggagcacgcacagtctcattccgagcatctcctttgcctttaaaagatgcctgatatatgcacgcgaatatgtgcggcaggcaggacaattacagccctcctcaatagggcgcatatccttctgatacttctggttgaacagattaagcttgccgtgattcgtgtatacatgtccgtgacggccgtttctgcttgggtatacacagtcaaagaagtcgattcctctctctacaccctcaagtatattggcaggagttcctactcccatcaggtatgtaggtttattaacaggcagatgaggcactgtttcatcaagaatatggtacatctcctcatggctctctcctaccgccagtccgccgacagcatatccatccagctcaagctcagaaatgcgctttgcatggtcaattcttatatcatcataaatagctccctgattgatgccgaataaaagctgctccttgttgatagtatccggtaaactgtttaagcgtgccatctcctttttgcacctctcaagccagcgcgcggtcctgtttacagagtttgtcacatactgtctgtctgcaacgctagatgggcactcgtcaaatgccatagcaatcgtggagccgaggtttgactgtatctgcatgctctcctcaggtcccataaaaatcttggcaccgtcaatatgtgagttgaagtacacgccctcctcctttattttgcgaagacctgccagtgaaaacacctggaatccgccggaatctgtaaggattggtctgtcccacaccatgaatttgtgcagtccgccaagctctttaatgattttgtctccggttcttacatgcaggtgatatgtatttgacagctcaacctgacactttatctcctttaaatcgtccgtagagacagcgccctttatcgcacctactgttcctacattcataaatacaggtgtctgtatatctccatgcacagtatggaatgtacctctcttggcacgtccctcttgttttagtaactcatatttagccatattttcgtttaattctcctgtttcttttacttatcgccattgcctacgatttttctgattaatattccgttagtcagcagtgtggtatctatgcaatgtctctcaaaaagtacctcgccgtcctttggcacctcaatatcctcatcagagcagttgactataacctccacatatgtatccacccagcccatctttctgaactggattacccttggattgtcagcaaaatcgtcagggaaatggaagtttctgccctttaaaagcggctcactcgcccttaaatgaatgagctttgataccatctcaatgcgctccttaaaccttcctgcctcaatatcatcccacggcatacatcgtctgcagtcagggtcatagctgcccggcatggcaatctcagtgccgtaatatatacatgggctgcccggcatggcaaaaagtactgcaagctgtgcaaagtactggtcgagattctttgtatcagagcgaaggcgctttgtatcatgtgaatcaagcagattgaaaagcacatcattggtctgctgcatgtagttggtataacatctgtttatagtatactcaaaatcctgattcgtctggctcttatctatccagaaatccttgatgctctctccaagcggatagttcataaccgcatcgaactcatctccacgcagccacggaagagcattatgccatatttctcccaaaatgtaaatatccggattgatttccttaagccttgccctaagctccttgcagaatcggtgtgacacctcatttgccacatcaaggcgcagtccgtctatatgataattttctacccagttggcgcagatatcgataaagtattttcgcaccgccggattatttgtattgagctttggcatattgtcaaaaaatccaaacgtataaaactgaccctttttagccgctccatgcttaaagtcaagaggccattcattgatcataaaccagtcataatactctgaatctgtcccctttgctaaaacgtcctgccacggtgcaaaataatagccacagtggttgaacactccgtcaagcattattctcatatcacgcttatgagcttctagcacaagcctcttaaaggtctcttcatctccaaagcgcgggtcaatctttgcataatccgttgtatcatacttatgattgctcggcgactcatttatcggtgtcaggtagattccgtttattccaagctcctttaaataatcaagcttttgaatgattcctgcgaggtctccgccgaagcactcctcatttttgacctttcccctgtttctccacggaacaacataatcaggatctatcgagtggtctccattgcagaatctatccggaaatatctgataccatatagtgtcatttacccacttcggtgtgaccggaatatcacacggattcatccacgggaatacaaagcactggcggcttctgccctcaagtgccatctgctctgcactcacgaagccatcctcaaagtagaaccatctctcatcctctgtgatgagctcaaaataatatttaagtctcttgaatggtggctttaccgtggttgtccaccatatctggtgctttaatttctttttaaatattatcggctgcttatcgccattccagatctcaccaccgcctaagataccggctgcgaacgggtcaccgagtatgatatttacttccttcacatcataaccggtctttatatttatgattaattcatcctcatttaaaggatagcagtagttgtcgtatgcctgatgaaataccccgttaaattccatgttttctccctcttttgctgtcttattgtagttgtttatcattgtggcgctaaggacggcacgtaagtcgcggtcaccgtgagcgtccacgcgctgccctgttcgctacgctgcgctgttaagattctgtacgaattatgcttatagattttctccggctgacgaaaccgtcgctactcgccctccatggctcgatagctccttgccccggcgtccctgccggtgcatttctgtgtatcgaagcataattctacagactctaaacagctccgctattcgctctcagggcagcacgtgtgcgctcgcggtagccgcggcttacgtgccttacgttgtggcaaaattgctacaaatgatgctgcttaattatacttgcttaaattatgcttcgcctaatttgcgctttgcatatacaggcatgcaagcatgcatcgatgataccttttgaccctttaatcacataattatacacaaacatagttcgaaagttatctaaataaaataatatcatagttttcttgactattcaacttggtattacttataatatacctattattgtaactataggagcttccgtgagaacaagaaagatcgttgctattaccgttcatcctacctaatagtgtgtccagcaacgattacagcccatttaaaatgtcttttcgaggcatgggatgcaatccctcaataattagcactatggcgcatcagctttttattctctatggttctaaatagttatatactatataaaaaggagaccatcatggcaggttcatcatacggaaatatttttaaggtaacaacatggggagaatcacacggaaagggcttaggtgtcgttgtggacggcgttcctgcggggcttgagctgtgtgaggaggatattcagatattcttaaacagaagaaagccgggacagtctaagttcactactccgcgcaaggaggatgatgcggttgaaattctctccggtgtgtttgagggaaagactacaggtacacctgtttctatggttgtgtggaataaaaatcagaaatcaaaggattacagtgagattgcttcgtactatcgtccggggcatgctgacttttgctttgatgagaaatacggcttcagagactacagaggcggaggtcgttcttcgggacgcgagacaataggccgtgttgcagcaggtgctatcgctgtaaagatgctctcgagccttggcataaaatttcttacatacaccagatcaataggtcctgttacaattaatgaggttaattttgatgcccatgagatttacaacaattcactttatatgcctgatgccgatgcagcgctaaaagcttctgaatatctggaggaatgtcttaaatcactcaattcctcaggcggtgtgtgtgaatgtgtcatcacaggtcttcctgtcgggctcggtgatcctgtattcgagaaaattgatgccaatctggcaaaggctattatgtctatcggagctgtaaagggcttcgaaatcggcgatggctttgatgcagcaagggcaaccggacttacaaacaatgatgcctttattatgagggatggcgctgtttcaaaagagacaaatcactccggtggtactctcggcggcatgacagacggctcaccgcttattttcagagctgccataaagcctactccttcaatcgcagctacacagcacactgtaaataaatccggtgaagatatagagatttccatcaagggacgtcatgacccgattatcgtgccacgtgctgttgttgttgttgaagctatggctgcaattactattgcggatgcactgcttatgaatatgggggcacgcatggaccgcatcacagatttttataaaaaattataactttgtcctatattaaaaagcatctatccggtttttttccggacagatgctttttatctatttcattggaacaatctgtaatgtttttcctagtgaattcaaaatatactttagaatatatttccaagaagcagcggatttaacaacatatactgcgcattcgtcaccccaaaagccacaagcgccagtggcagcacaataaaaaggacgcatgatataatcacagacatgccgcttcttaagtatttaaacattgcaaaaacaaacaggctgaccagtaatccccctataaagcgcatcagcattatgataagtatatactgccctaccgatatattctgcgaaacacgccacagatgctccatacttgccgccggagcattaagcccctgcgtgccatatgccgaaagcacattgcacagccgcacaatatatacaagtgcaaatgctgtgacagtgcccaaaaagccaagtatgcatttgattcccatatgctgtttcctgccacggcgggtagtccttaaaagccggatttcatggtttgcataatccgctccacatataccgcaggctattgctattaggagaataacatacacaaaggcctgtgctgtatcacggtttttgaagtctgttctgtcggtaaggatatcatagcccttttcaaaaaacagccagcccttttttaacgtcttaagataatccacatgtgctgtaagcttgttgaatgcctcctgtctgctcagttcatccttgtactttatattgatatagctttcactcttcccctgctccatatcgtaagcaatgttatctgacagccggtcgtattttgctctttcttcatccagaagctcattggttttggcagttaaaggtccataatatttgtccatatattccttgtaatacacctcatcaaccgagtcataggaaagcttctctgccggattccaccataccacaaaaagagctgctgcaatcaaaataagtaacacttttcccggaacaagtgccttatagcattcgtgcaaaaataaagatgtatggcagcctgtatttttaccgcaggcaaagccgggcagtaaaagcagcttcttttcatgcaccgaattgagataatttgtaaccgcaaaaatacatacagctatacacacaagccagaacaagccatacaataccccggtattaagcggatatccaaacagattgatattgacataatcagaaaaaagtctgcctgtcctgactccgtacatgatatttatgtacttaaggaaggctaggaagctggttcctgatatcgttgtgtagcagatagcctcaataaccacggtcactgcagaagcaacgaacacaaatataatattgtcaagcgctgcgcatatcagcataaaaaacaagccaagcaatataaagcttattattttcacaggaaaatagcatgccagaaattgtcctatactaagcttaaacggactgccatagtacagataaacactttgaagcggacttttcagatttatcggattgtaaaagcacatgcttatgactgcattgatgccatacaacagtaaggtgataagaatgaccgccataatcatcacaaatgactttgacgccataagctgccttctgccccttgcagttgttctaagcaatgcaagctggttctcgcttttttcataaaaaacaaggttgagcgcaatgataaaaagcataatcactgccacataatccgtgagctcattgtctgtaatattcaaaagtcccgatgcatccataacctcaggcactgtgccttcaagcttactgtagactctgctcgttttagcagcatttttctctgcaaagcctccattgccggaaaacttattcataatcgaaatctcgtcagccttttcattgacagagtccagatactcatcataagaaagacatgccaatgcttccttgtataccctgctgcacagactaatcctgccgtaagcttctgccgtcatctgcctctgttcaatttccggcaaaacatcctcacgactgtaattgcttatttcgccatacagcgcgctgtagtccttacctgtatacccatcatcatttacagtattcatggtatacagtccaagaacaggattcagaacaagcaaaaacaaaagaataagcactgttcttttagtcaatagtttacatatttcgttttttactatatccattttcagtccccattaagatacaaatacaagtcctcaagatttggccgcacagcctccttctgccatctgccatcatacgaatcggcaataatgcgggctatgacaccgtctgcatcccttgaaatattgctcaccttatatctggtgttcacctcatctatctcattatccgataaaaaaatattccatacctttccatccagctcctgaagcagctttgacggagaaccactccttattatcttaccgttgcttaacataactatctctttggcgataaactcaacatccgtaaccacatgagtcgcaataataacaatcttgtcctttgcaacctctgatatcagattgcggattctgattctctccttcgggtcaagccctgccgttggctcatccagtataaggatgccgggattgcctatgagtgcctgtgctatcagtgctctctgcttcattccacccgaaaaagcgccaagcttttttccaagaacatcatcaagctttaccatgcgcacatagtgatctatatcttccccggcttcactcttttttaaccctttcagggatgccataaagtaaagaaagcgcctaagactaagctccggatatatattctgctgctgcggcatatatccgagaagcttcctgtattcacttccaagctcgtctatgccccttccgtcaagcagcacacggccttttgatggagtcagattgtcagaaatgagattcatcatagttgatttaccggctccattaggtcccaaaagcccatatatgccgggtgtaaatgaaaaagacacatcatccagcgcagttttatccttataaacttttgtaagcccctccaattcaagtgtcattgcttatattcctcccactgacttctcacgctttcaagatagctgtccattccatctgctgtaagcttttgtacggcaccgtctaaagtatcatctacagtggcaccatgcagtcctgtcatgaaatcatctaaatctgttgaaatactgcccatattcttagtatccggttcgaagccgataaacggagacaatgtggcattgtcataaaagtcaaaaaactccttcttacgattgtccacatatttctcgttctttgtcggataaacattcacgaaaagattaagactaaacttcgtcagatagtcatcatccagactgcctccatcacaagcttctgcaatgccatcttttagcttataatccttatctttttcaccgtacaaaaggatattgccatacttttcatttccatataacagactaaggaaatccatcgcagcagaagcatcctttgctttctttgctacaccgatggagccgtttatccttgatgaaaggtaagtctttacttcctttaccgtgatattgtcctttttgaaattttcatccacgctaccgacacataaagcagccgcaaaattgcctgccttgatattttttaatatctgagcatcattcagccccggattgttgagatatgttatctcatttgtcaaatcatcagacatatagccgtctttcttcatccggtcaagcaccctcagatacccggtaaatttctgtgactctaaaggatttccaacagacatagtatcatagtcgaagcagagcccgtttcttatctcacagccaagcatatcatcaaatctatatccgtttatgagatactcgaacctcggagtatcacttttatcccatttaacaccctgaagtatctgatatattccgtctatgctgccatcccatgcacttatcgcatcgtcagaaacgtaatccctgttgaaggctgcataaactactccctcaccacttgcaagtgctgacggaatcgaataaatatgcttatcgcatttaaccatctcccaaagattctttggaaaagcctcataaagtgtttttcctttatcgcctgataagatatcatcaagattcaggaccagatccgagcgtaccagatcatacaccggattatttccggcagcatcaccgaaacccaggaatgctatatctgttttaccgttttccaaggctccctcaacagcctgtccgtaattgtcataggacaaggttttgatttcgagctcataatcatgtccgtccgcagcaagtgcatcgttgaacttctttagattattcttatcaatcttacaaatatcaggtacagcaaacgttataacctgcgcatctgaatttcttttgttctctgattcttctttatcagctttatccgacttttttgttttatcagccgactctgtccggccttcgctgacagctccggcattatccgtttttctgttaaggcagactgccgccactgctataacaacaatgactgctactgcaaccgctatcaaaataccctttttcttactattcttcatcatcaaaacacctcaattcctttggttcaaatactcccttgttcaattcatcaagacttattaccccaaggcacaactttccgttatcatttgtatatgtgacatataccgactgaccgcatatgcttgcaatgctaaatgccttttcagtagacagcttcatcagttcttcactcttatcatccttcaagcgataatatgtcacttcatcacttttttcttcagaaagggcataatataaaaagtctccgctcttttttaatggtccatattgtgtttttccatccgcatctatcggaagctgtcttgtctgtctgctttcggtgtcaaacacaaaatatccatcctttgacgaataataaccatcgccatctaacagcctaagatcgttaatatggtctatttccgtcagacatgttgtcttttcatctgctatatcatattgatatattccattaagcatattatcataagcaaaagactccgcatcatctgacgctccctcctctatcatcagctctgtaacatcatctccaaaccgcacagtcgaatagtacactacttcgtcttcataatatatgtccgtaatatttgcctgttcgcttgttatcttatcactcatatacaccttgtaattatcgagatctataacaaaaataccggcttcaggcttatcatcatttacaatctgtccttcatcattaagctctattctgttactgtaagctcctataacataattatccctgtacaaaacagccgtaacattctgaacattctctaatttggctgcttttttacgattctcaccgtttgagtccataacatacagatattgaactgtcatatcttcatccgacatatttcctacataataaagatggtcattgtaaagcaccgttccggctccttctaaaccataaaaagctgcaggacatgagggcttctcattggagcccgagaatccttcatgtgtgcagttgggcttatcgcaatagaccatgtccttgcctgatgccgtatcgatgagatgcagtattccggaatcatcaagatacagtacattgtcctgtgaataattacatcgtacatctccagagccatatgtgtacattgtattggaggtactgcggtttctattctttactataaaaaccgcagccacaatacagatgataagtatgaagatgattgatgcgattaatatgcgttttttcttcatagtgcccctccttttttgataatattatacataaaaacaaattactccgaatacaaaaggcgaaattagtacttttcaaggtgaatttattaaattttcatcaatattttcacggtgaaccgttcatctgaacactcaaaatccagtgtgcttatatatttatcaagcactttctttacattctttaatccataaccatgttctcttacagattgctttgtcgtaaccggcaatccccctttaaatatcactttttgtaaacacctgttactaatctcaacaacaagtgaatccattaaataattaatttccaaatctatgcttggattttttacatctttttgtgcctctatcgcattctccaaaaggtttccaaaaataatattcatatcatatgccgataattttaaatcactcggaaccacaacttttacattcaactgaattttcttatccaccgcacgctgaagcatataatttaaaactgtatcaagcgccgtatttcccgaatcaaccagccgccttgattctacaagattattctccatagctgacacataattttttatctgttctatttcgcctgttgaagcaagcaccgaaatctctgcaaaatgacgtttcatatcatggcgaaacgatcttaatgcctccatgttttcattctgaagcataatctctctttcataagaactaacctgatctctaagtgcctgattttccaaagccttctgagaagacttaacaagatcatccatcagatatgaaataataatattcacaagcagaaatgctccgcacactaacgaaagagaaaatgatgacacggttttatccataaatattactattgatgttataatacatactaataacgacgcaataataaacaaccaataacgattattcagctctatgcctaaatcatttccaaaaaatctttctgtaatcaactgtacagcatgcaataataaaagagcaaatatacttacaaaagctgaatatccatcatatccaaagggttttattaaaaatgcacttactactaaatctatgagacagcttactgccaaaatataaaaaacaaatatacattttctttttatcgtaccattatatgataaagcaattgctgacagccctaagaaaatactaaggaaattaaatatcggtttatgaaaaaacaagtttacaaatatcgctataaaaacactaaataaatatgcaaatacctttcgcactctgtttccatcattatcaaaaaaagtatgagtaaatctttctgcaataacagtctgagctacctttgtaaacaaaataaccattgctctttcaaaagtcatatcacttccttactccttccatagttaaaaactgcttgcttaaatgaagcccttttagactgtgctatacttatttccataccatttttcagtaaaacagcatcacttttccatgatttaatacattttatattgactatatatgacttgcttatgcagacaaactgaaacggaagatttgatataatatcactaagttttccataataagatacactttcaccatcggttttacatatagtaatagttttatttctgctggaaaacaacataatttcaccatacggaatagaatatcctgtcttattatatgtatatctgaattcttttttctgtacatcttcaagttgtagtattttagtcagagtatcatacaaaacattatcatctattggttttataagaaaatcatatggatgaatttgaaaaagctccatagcatagcttgttttatgagaaataaacacaatattcatcctgtcattatgaagcgtttcccttatatattttcctgcataaaccccattatcacccggtaactcaattatagtggctcagttgtcaagacaaaaatctgagatttttataatgaactgatatggttgataagttacagagaacataggggaagtagttgaaccttccccagtcccatttatgctaagctacatatggcaacagcattgccggatagtagcattcagccggtgtcttataatcaagtgcagaatgacgccgctcaaagttgtaagtgtggatatactgtccgatggcagttctggcttctttgatgttattgtattgtgtcagataagcttcttcatatttgaagctgcggaaccaacgctcaatcatgatgttatctgcccagcggcttttgccatccatgctttgccggatgccgtttacctttacaaaatcaatgtactgctgacttgtaaactggcaaccctgatcagaattcaatatctgcggttttgctactttgaatgccttttttaaagcattaatgaccattctggtatcaagcgtatcatctacttcccagccaacgatgcaacgactgtgccaatcaataacagctgtcaaatatagaaaacctcgcttgattggaatatatgtaatgtcaatagaccatgcctgatttggcttatctatgatagcattacggagcagataaggacataccttggcctgttgcatacgcttggaaaggttcatcttaggatagattggataaatatccatttcattcatataacgtcgtgtttgtcgacgtcccacatgatatcctctagccttcagttgggcggacatttgtcttgcaccccaggatgggttatctgtatggagatgatcgataatctctttacaagccagttcttcatcggatgtaggcgtgcctttgtaataaatacttgtacgattgatatcaagcagttttgcgccgacagaagccgggatttctttagtcgtcaaaaggttttggactaaacttactctcgtagtctggtccacaaatttcttcagatttttttttgagccaatcaacctgcatggttaactgaccaacctttttggcatactccgccttttccttacgttcttcagcaagcttttctttgaggttatcctcacgcttgtcatcaaatacagcagaagcattgtcgaggaattcttttttccagttgcggagcagattcggctggatattattttcaacagcaagggtattgagatctttctcacccttaagtagttcgattacaaggtctgatttaaatttggcactgaaatttcttctttgtctggacatttttatgaatcctttctttgttactgattttagtatatcagattcattataaattgtccgaaaaagtgtcttaatttatgagaccattataaatatccagaaaaagtatctgcggattgaattcttttatatctctacataatgacatagaatcataccatacttcaacctcgcatttttcagctctattattaaaatattcaataattattttttcgagtacagcgcactgattaatctcgtcatcacatattgccactttataaatcatttgttatttttccttctgttatcttactccaaaattactttttataattttatctaacataatagataaaatcaacaatccatgcacaaaacgaccattttttgcagaaaatggacataaactatgcttacatattataatgggataataatagaaaaactaaattcattgttttcatttttaataacatattcgccattgtacttttctacaatttgaataatattttttatgccaatgccatgcatttccggttcatcttttttacttgtttttatttcattaccactgtaaataattggatgactgcatgtatttttcaccgaaagaactataagattttcctctatcacaaactttagttttatagttttcttttcctcacatttttcacatgcttcaatggcattatttagcagatttgctaaaatcactaccagatcctcatcctctattacaatttttgataaatcatttaccttaaacacaaaaacaatattcttactgatagcctcctgatactttgtattaagaatggcatttattatcacatgatttgtattgattacatttttttctccaataaaagcattgctgatatttcctacatatttacttgccttgtcatattcatgagctttcaataaagattctatacacaatatatgatttttaaattcatgtgactttttcttctgaatttcataattttccgaaatagaacggtacatatcaatttgatttttaaactgtaatcccaatatttccttttcatgcaatttagcttcactggttacaatatcgttaatcagaaaatatacaaatatattcatcacagccaatcccaaagagatagaatataaaacgttcgcctgcacttcattttttgtatattgaaacgtcataatcattgctataattgtaattattgtaaatacaggaaaaaacaaaaatcttccccatattttgtcaggtaaagtctctgttgatttttttccaaagtgtttttttagcagtaagatacataaaaatacggtaatcttgctaaaaataacaaccaagcttccctctaacgcatatcctttttgtacctcacccgcttttgaaataattgtgttattactaatataagctatataatcaactatgattgataatccttgatataataatgcaaaaatgactgatttttttatactaatttcaaaataaaaactcataattataactgcagccagtacaaccaacgtcattttcaatataagcatatcagacaaaaataatccgcataaataatagcagcaaatcaatgatagcatcagcaaaactttttgactttttcttaatctcgaattttctttgcaaaaaacatcgtaaaataaattacaacatatcgcttcaaatataataattactaaactgaaaaaatatgtaaacatatatcacaattctcccttatatgaaatgaatgcatccttcacattcttatatcttgccttaggtatgagcaattcctgattattacataacagtactttatagcatttaacactcctaatatatttcaaattagtcaaatagctttgatggattctaataaaatggaaatcttttagttcattttccagctcatttaatgtgccatataaattatagattttgattttatcctccatgatatagaattgcagtttatgtaatttgctttcaatatatagtatattgtctatattaatctccttttctccttcattgaacttgaattttttcttttttactaccaaattcatcttatgaagaatggcatccatgcattcgcttatggaagcctccaaattagtattatttttcaacagatatcttatggcttcgaccttgtagccctccaacgaataatttatataagctgtcacaaatacaatatatatttcagaactatattccctgattttttgtgccgtaacaattccatcaacatcatccatattaatatccaaaaaaatgatgttgtattgtttaatttcaattcctaaatcaattatttccttacctgatgaaaatgtatctatttcataagaaatctctttttcgtttaaataggctgcaacatatttatttatattatctctaaatactttttcatcatcacatatagctatttttaacattttttctccattactatctgttgtatttcagttattatttcaacaaattttcaaataatccgtattttttaacgaaaaaatccgcaatactataatttagtatagcggattcattcctaaaaaacaattattttaatctaaagcgatagcctcattttcctgacgtcttaaaatatcaaactcatcaggtgtctctgacagctttacatagaatacctgctgtggatgtgggcaggattccatctcattgccgtcctcatcaacgagtgcaagcactgttgcaagcacattgtctccgtttggcttcatgatttcaatctgctcgccaactgagaacttgtttctctgctccatgcggtagaggcctttttcatttggagcacctacgataccaaggtatgtgtagcccttctcataagtattgttatcgtatatctgagtctcctccgaaggctttccgtagaaaaagccagtggtaaactgtctgtaggtacagctctttatctgctctaagtaccatggcatatttgcctcgtatttctcaggtgactcaagataatcatctatcgccttgcggtaggttcttgctactgttgccacatagagagcggtcttcatacgtccctctatcttgtagctgtctattcctgcatcaatcagatccgggatatgctctatcatgcaaaggtcctttgagttgaagatatatgtgccgcgctcattctcgtataccggcagatactcacccgggcgcttttcctccacaacagagtacttccagcggcacggatgtgtgcacgcgcctttattcgcatcacggcctgtgaaatagttggaaagcaggcatcggccggaatatgagatacacattgctccgtgcacgaaggtctctatctccattctgtcatctatatgccctcttatctcctttatctccttaagcgaaagctctctggctgtcaccacgcggctggctccgagattccaccagaactgatatgtgccgtagttcgtgttgttggcctgtgtgctgacatgtctttctatctccgggcagacctcctttgcaatcatgaaaactgccggatctgcaatgatcagtgcatcaggtctgtccggcttcatattgtgaagctctgtaaaatattcacgcactccgtcaaggtcatagttgtgagccaaaatattggcagtaacatacaccctcacatcgtgagcatgcgcaaaggccacgccctctgccatctcctccatggagaaattcttagccttggcccttagtccaaatgcctctccaccgatgtaaactgcatcagctccatatataactgctatcttaagtacctccaggctgctcgccggacaaagtaattctatttttctcattttttctcccatacagttttgtattcatcaaatctttgttgacaccgtaattccatcgcctataggcatcactgccgtcaccagctcatcggagtgtgtaagctcgtagagatactccctcatgcgcttatagatggtacggtttctgcgctcaacgatatagtgcgattctatgatatcgccatcctgcagcacattgtcggacaccagcaccccgcctgtctttaaaaggcgaagcacctgcggcataaagttgatatactgtccctttgccgcgtccataaatatcatgtcaaactgtccttcaagctgtggaagtatctccgttgcatcgccctctaagagtgtaatctgctcctgcttcccggctctttcaaagttggcctttgcgataggtattcttttttcgtaattttcaatcgtcactatctgacaacccttcggtgcatactctgccatcaaaacggcagaaaaaccaaccgctgttcccacctcgagaatacgcattggtttttgcattgcaagaagcagctttaaaaagctctgcatctcttttctgataatcggaacgaagtctcttaaggcttccttctctatctcatctaatacaggcgtgttgcctctgtccaaggaattgatatatgtgacaagtctctcatcaactatcattcttgtatttcctaatctaattattgacacaaatgcgcttaacggataattactgtgtatccgaaggctccgtagtctgtgtctgttcttcatcgctcttgtcggaggacatgattaccatcatatcctttgccgtcattgaagtgttgagtgtgtaaatgcccggctttatatgtcctgagtaagcagacagcttaagctggagataaaataaattgtgatcccttacaaggcccttgtcctctaaaagctgtccaagctcctctgcggagatgcccttttccacctgaacgagaacatcctgaccatcgccgtttgtcatggcaggctcagtaaaaactctgtagccaaaatcatagcagatgctgcagatttttatgcccgcaaacagcactaaaagagcaatcattattgaaaaagcaacccttataaaaccaaataaagccttgttaaaatccataagctgttcctacacttccataattataggtataatcatcggtcttctctttgtttccttccaaacaaagtctcccaatgcatcctttacctctgtctttatcttgccccagtctgtcacattgttgtctgtcagacgctccattgtgtcatccagcacgcatttcgcctcatccatcaggctctcagaattgcgcacgtatacaaatcctctcgatacaatatcaggacctgcaagcagctgtcctgagcctgcctcaagtgtcatcacaacgatgatgattccatcctcagccagacgctgtctgtcacggagcacgatatttcctacatctcctacaccaagtccatcgaccatgacattgcccacatgcactctgcctgtcaccttggcaccgtcctcattgatttcaagcacatctcctgatgaaaggatcttgatgtggtctgtatcatatccgagctgctcggctattttggcctgtgccacaagatgcttgtactctccatgaacagggattgcgtactttggattgacaagagaataaataagctttatatcctcctggcaggcatgaccggaaacatggacatcctggaatataacgtctgcacccttcatcatgagctcattgatgatacctgtaaccgacttctcatttcccggtatagggtttgagctgaatacgatggtatcgtttggctttatggatacctttctgtgggtaccgtttgccatacgtgaaagagctgccattgactctccctggcttcctgtcgtgatgatgacagtctgctcatcaggatagcttctaagctgttctacatctataagaatattgtcaggcagcgacagataaccaagctctgaggctatcgaaatgatatttaccatgcttcgtccctcgatggctacctttctgccatacttctccgcacagttgataatctgctgcacacggtctacatttgatgcaaatgtagcaatgataattctgtttttcctgtgatcctcaaagatgccgtccaatacctttccgacagacttctcagactgtgtgaagcccggtctttctgcattggtactgtcgcacataagcgcgagcacgcccttctttccaatctcaccaaaccttgcaaggtcgattgcatctccaaatacaggtgtataatccaccttgaaatcgcctgtatgcacaactatacctgccggtgaatatatagcaagcgctgctgcatcctggatactgtggttagtctttataaactcaaccctgaagcagccaaggttgatatgctgtccgtattttacgacttttctcttgacagtcttgagcatgccatgctcttcaagctttctgtcaataattccgatggtaagctttgtagcgtatatcggtacatttatctccttaagcacatatggaatagcaccgatatgatcctcatgtccatgagtgataaagaagcccttgaccttatcgatgttctccttaagatatgtgatatcagggataaccaaatctattcccagcatatcgtcctcagggaatgataatccgcaatctactacaataatactgtcctcatactcaaaggcagtaatattcattccaatctgctctaatcctccaagtggaatgatcttaagcttacctgtattctgtttttctgttttcttcaaaatattacctccaaatttatttcacgtacaactgcaatcctaatattcaagtgcagtgtcatcatccgtaagctcagaaaataccttagcaatagccgaaaactcaacatcgtcttcaaccatctgataaagcacctcttcatcctttgtgcttacttcttttaaaatatatgcttcacagtctccgctttcttctccttcggaaactaaaagatatcgtgttccattaagtgttgtctcttcttcaaccgcaaactcgacaacatcattggtctgcggatcagtaaatttaattttctgcataaaaactaagaccgactatttgacagataatccaaatatccctgcaaaataaaaatcgccgcaatttcatcaacaaactccttgcgattctccctgcgtatgccggtttccatcatagaacggtcggctgcgactgttgtaagacgctcatcccagtatatgacctcaagacctgtgcgccttgcaagcatatcaccgaactccttcgtcttctcgcagcgttctccttccgtattattcatgtttttaggatagccgagcacaatcctgtccaccttgtactctgcaataatctcctcaatacgtgccaaagtctgtctgagcttggatggcgacttcctgcgcactatctcaacaccctgtgctgtgattaagagctcgtcgctcaccgctactccgactgtctttgaaccaaaatcaagacctaatatcctcatattaatcccatgcgctgttctcaatgtatgtcttgagaacctcctccacaagctcgtctctctcaaccttcatgatgagacttctcgcgttattgtggcttgtgatatatgttggatctccggacataatatatccaacaatctgattaacaggattgtagcccttttcctttaatgccttgtacacaatctcaagtacatcgcttacctgaagctcaggctccttttgaactgtaaaaaattgtgtgttgttaatatttttttccatacgtttcgcccttcttgtaatattattttattataaatgtaataaaattacaaccttttattattcgaagagtaatatttcgtctgtaagcatacccgatatacggcctgaaactatctgattttcaaggttttcgtcagttttcttagcgaccttgacatattccttagtatatccgacaaagtattctttatcaccgattacggccttttcctcaaaaagcacctcctcattctttccgatatagaatttcctgaactccttagacatgtcatgaccgagtgctatgagcttttcgcttcgtaccgccttaatctgctcatctatctggtcaggcatcactgcggcgcgggtgccttttcgctttgagtacttaaagatatgcatctcataaaaatgtatatgctcaagatatgccttagtctgttcaaactcctcctctgtctcaccaggaaatcccacaatcacatcggttgtgatggccggatgaacaaaatatttacgcaaaagctcacagcctctctcgtactctttagtggtatattttctgttcatcctcttaagtgttgcatcgcagccgctctgaagcgacagatgaaaatgaggacagattttatcaagctttgaaagctcactcgcaaagtgctctgtcacaatcttaggctcgagtgacccaagcctgatgcgctctatgccctttactgtgttcaccgcctgtatcagctcaagaaggcctgtagcttcctcaaaatccacaccgtatgagcttagatggatacctgtcagcacaacctccttgaagccgtttgccgcgagcctttcaacctctgctattacattttcaaacctacggcttctgacacgtcctctggcatacggaatgatacaatagctgcaaaactgattacagccgtcctgcaccttgatgaaggctctcgtgtgctcctttgtctggtctataaagagctcctcaaaatcatgctttccatcatttatatcgtccacggtatcgtttacactgtccaaagagtattcctcaagcagccttacaaggtcatgctttctgtcatttccgatgactatatccaccgataagtcgtttaatacctctttttcacttgtctgcacatagcagccggctgccacaactattgagtccggattgtttttctttgccttgtgaagcatctgtctggattttctgtcagccatgttggtgactgaacaggtatttatgacatacacatcagctttttgtgtgaatggaactatctcatagcccgcctcctcaagcagatgctgcatggcctctgtctcatatgcatttactttacatcctaaattatgtaaggctgcttttttcattttatttttttactcctatttaattgacttttccttaaaaaactattactatctatatgacagtagttatttaaggaggttttcaatatgaaaacagtacagatttcattaaattccattgggaaagtaaaatcattcgttaacgctattactcagtttgatttcgattttgatttaatatcgggcagatatgtcattgatgctaaatcaattatgggtatcttcagcttagacctttctaagccaatagagctcgctatacatacagaaaccggacttgacgagattatggaagtattaaagccatatatcatcgacgaagccaagtaatacagacacaatgatttgattaattaggacctgaagctcaggtcctttttattttgctctaaggtggcactgattactcagcatccaccataatcacttctgtagtatctatagctgtcttcataagctcatctatcacatcgttaagtctttcctcagacttcttaatcctgtttatattcggctttgtaacaggatgctttgctacgaaaatagtacaacagtcctcatacggaagaatcgatgtctcataggtatcaattttgtttgatatatcaatgatatcattcttgtccatggcaatgagaggtctgtatacaggcatatggcacacctcgtttgttgcagcaagtgactgcattgtctggcttgcaacctgtccgatgctctcacctgtgataaggcccaagcatttatcctcatcggcaaagtgctctgctatcttcatcatgtatctgcgcatgatgatggtaagctcatcatgaggacatttctcatatatggcaagctgtatatcggtaaaattgacaacatgcagctttatcctgcccgaatatctggcaaccttctttgccaggtctacaaccttctgctttgctctctcactcgtatatggcggtgcatggaaatatgtggcattgattaccacgcctcgctttgcaatcatgtatcctgcaaccgggctgtcgattccacctgagagcagaagcattgcctttcctgctgtgccaagcggcataccgcccggtcccggaatctcctctgaataaatatttatcataggtctgatctctatattgatcataacctgtggattatgtacatctacccttgtctcaggaaatgcctccagcaccttttcaccgactgcggcatttatctccatagaggtcatcggatagttctttctggcacgtctcgcatttaccttgaaggtaaagctcttatccttgtatacgtggttgatatgctcgataactgcttcacagagcttgtcaaagccctcatcctcatgcagctcgaccggacagatacccacgataccaaaaattcttgacaatgtggcaactgtctcgtcataatcatagtctccgtctgtctccacgtacacacgtccgctttcctttcttacctcaaagcttccatccacattgcgaagctgatatttgatattcttaacgagcgcgtcttcaaaaatgtatctgtttttgccctttatcgcaatctcagcatacttgatcaaaaatgtcttgtacatgtaactctcctgttctggttttatttattatttattatttttaattacttaatatttcattgtatgcgtaactttttagccattcatggttaccggctatgctaatacctgcgatctctttgcagctcattagcgccttgtatatcttcgcagcattggtatcacctctgccatcactgatacagcgtaatcaatttcctcctgtgtggtattcacgcaaaagctgaatctgatcgtggaatccaaaagtgacggcttaagccctatgctctttagtgttgaactgattgccggtttgtttgatgagcaggcacttcctgcagacacatatatctgcctgtcctcaagagtatgaagcataacctccgctctcacaccatctacgctcacgcttaccacatgaggggcatttgtatggtccgtgcgtccgtttaccgatactccgtcaatacgctgcactgactctataaaatgatccctaagctcatacatatgtgctatttttttatcaaaatccgtgtaaatttcctctgctgccactccaagacctgcatatgcaggaacattttccgtacctgagcgcatgcccttctgttggccgcctccgtatataatcggcttgattttagtcttgtcctttatatataaaaatccgctgccctttggtccgtgaatcttgtgtccactgactgaaagcatgtctatattcatgcgctttggtctgatttcaagcttgccgtaggactgtatggcatccacatgaaaaagtgcggcaggatttttctcttttatagctgctcccgcctcctcaatcggcatgactgcgccaatctcattgtttacatgcataagcgatacaagaattgtatcctcccttacagcatttttcagctcttcaacacttatcacgccgtcatggtttacaggcagatatgtggtttcaaagccctgctcctccagaaactgcatcacagacaaaaccgatgcgtgctctacagaagatgtgatgatatgccttcctgcacgcttattggccattgcagcacctattattgcagtattattcgactctgtgccgccggaggtaaataatatctccttgtcctgcaccctgagtgtctttgcaatctttttcttagcatcattaatataattttctgcctcaacgcccttcatatgaagtgatgaaggattgccgtaatcctctgtaagcagcttataaaccatatctgccgctgcttttgagcatctggttgtggcagaattatccaaatatgcttccatttttgctcctaacttctacttcttaactgttaagtatctctactgtctatacatccaaattgtatacaagcatggcaagtgcagcaagtcctgctgtctccgtgcgtaaaatcctgcgtcccaagcttattctgtgcattgtggcatgctcatccacaagtgctatctcctccggtgcaaagccgccctcaggacccacgacaacaccgatagtctgaccagccttaagctgccccattatctctcttgtcgcatccatgccacgctcattctcatatggcaccagcgtgatgtcaagctctgaggcgattttcaaagcttccttgtatgtaaccggctgcttcacagtggggattactgtgcgctttgactgctttgctgcgctctcagcgatagcctgccatctctgcagcttttttgctgcctttttttcatccagctttaccacacagtttttcatggcaaccggtactatctcagatacaccaagctccacagccttttgaataataagctccatcttatcgccctttggcagcccctgatacagcacgatgtgattgtcaagctctgtgcctgtctcatctgcactgtcaatagctgcgatgacctcatcatccagaatcgacgatatgtgacagaaatatgcctgtccggattttgagcttactcttattgtttccccgtttttcatgcgcagtacattctttatgtgatttacgtcacctccggtgattgagatgctgtcagaatgaacctgctcttcctctacaaaaaactgatacataatccaccaaactatttagtcagcttctgcgcagtgatattgacccattcaccctgatgattgatttctatcaccttaagccccgctgcttcgatagcctctttaacttcattttccttgaaatctatgatacccgatgtgataaaatatccgccttcctttaacctgtcaggaataacaggtgccataggaatgatgacatcagcaaggatatttgcaacaacgatatcatatttttcggtaccgaccttcttttgaagctctgtatcatcaatgagattaccgacataaaacgtgccaagcttctcatccagatgattgacctgcatattgtcacgcgtagaaatcatgcaatcagcatcaaggtcagtacctacaacctcctttgcaccaagctttaaagctacaattgaaaggattccgcttccacagcccacatcaagcactgtaggtgcttcctttgcgccctcaatatacttgataagctgcttgatacaaagctgtgttgtctcgtgctttcctgtaccaaaggagattcctggatcaatttctatcataaatttatccgcatcctcaggctttacctcttcccatgtaggcttaatcaatatatcaccgattgtaaatgatgaaaaatacttcttccagttattaatccaatcgagatcctctgtctcagatgacgaaattacaccgcttcccacatcaacagtatctcttaaatcctcaagtccaagctttacctttctaagcatatctgactggtcactgccatcatcctcaatataaaagctgacatggcttatgccctcatccggaggcagctccggcagaaaatcaataaacatatccgcctggtcctcttttgtcagaggaatattgtcctcaatctcgattccctcgataccaagctccataagcatgctgctcatgaaatcctcagccgcggttgttgtctcaatcgtgtatttcttccacttcatataaaaatcctctcttaataaaatagatacatagtataaatacagttttatttcaaaacatttccgtacattttacaaggcagtcatacgactgcctccacaacttatctcatataataccataaaaatgtgctgtataaaagccccatttttttatacgtaaaaatagcctaaaaaatgccccgccacacatggcgggacatatattataggacatctattacagatcatctattacaaatcatctgtttacagatcatccaaagactccttgagcttatccataaatccttttttctttttagaatcagtagaagctccgccctccttggtcagagagccgcctgaaagctcatcaaacttcttaagagcctccttagcttccttagacagacctgtaggcgtattgacaacaagtgtgacataatggtcacctcttattgctttatttcttgttgaaggaacacccttgccctttaagcggatacgtgtacctgtctgtgtacccggtgcaactgtgtatataatatctccatcaacagtcttgattcttatatctccgcctaaggctgcaatagcatacgagatggatgcctttgaaaagatattaacatcctgacgctcaaaatccctgctgcctgaaacaataacttcaacaagaagatctccacgcggtccgccatttatgcccggctcgccgtattcacgtattctgacacactgtccattatctataccggctggaatctcaacagtctttctgaccttcttggtattgtagcctgtaccgtggcatgtaggacacttatcctttactaccttgcccgaaccaccgcaggatggacatgttgtgacattctgcactactccaaacagagactgactctgtctgacaaccttacctgtaccattacactgggtacatgtctcaggagatgtgcccggcttagctccgtttcctccacatgtagaacatgtctccttatagttgaattcaagctcctttgtacagccaaatatagcttcctcaaaagaaattcttacactgagacggacatttgcaccctgtgcaggaccatttcttctgccactgcttcttccacctccgaagaaatctccgaaaatgtcaccaaaaatatcccccatatccatgcctgagaaatcaaagccaccggctccgccgcctgtgccatcaaatgctgcatgaccgaactgatcatactgacgtctcttatccggatcagacaatacggcataggcctcctgagcctccttaaacttctcctcacactctttatcacccggatgaatgtcaggatgatatttctttgcctgctgtctgaaggcttttttaatctctgcatctgtagcggtcttagatactcctaatacctcataataatctcttttttctgccataattgaaaattccttttattatacaactaattcgcaaggccggccaagcggccaaccttgcgagtaattttacttacgcagccatcatgatgctttgattgataacccgaattacaggtcattaatcctcatatcattatggcagcatctgtttaattatacttccttgaaatctgcgtcgatgacatcatcatctgcaccgtttgaagcgcctgcattcatatcaggtcctgctcctgctgctcctgcattcatgtcaggtcctgctcctgctgctccctgcgctgcctgagcctgctcatacatctttgcaaataccttctgagcactctgtgtgagcttctcctgtgctgccttaagctctgcaacatcagcctctgtcatagcctcagcctctttatgtgcatcaaggaatgacttaactgctgcgatatcagcctcaactgctgacttatcagcggcatcaacagaatctccaacctgctttaatgcatcctctgtctggaatacaaagctctcagcatcatttcttgcatcgattgcttcttttctcttcttatcctgtgcctcaaactcagcagcctctttaacagccttatcaatctcatcatcagacatattagatcctgctgtgattgtgatgtgctgctcttttcctgttccaagatcctttgcagacacatttacgataccatttgcatcgatatcgaatgtaacctcaatctgtggaactccacgacgtgctggtgggataccatcaagtctgaactgtccgagtgatttattatcgcgggcgaactgtctctcaccctgtactacgttgatatcaacggctgtctggttatcagcggctgtagagaatatctggctctttcttgtaggaatagttgtatttctctcgataagtcttgtagcaacaccacccattgtctcgattgaaagagaaagtggagtaacatcaagaagaagtacttcgccggcaccggcatctcctgcaagcttaccaccctggatagaagcaccgattgctacgcactcatcagggttaagagacttgcttggctcttttcctgtcatctgctttaccttgtcctgtacggccggaatacgtgtagaaccacctacaagtaatacctgtccaaggtctgcatttgtaacgcctgcatccttcatagcgttctgtactgggattgctgttctctctacgaggtcatgtgtcagctcatcgaatttagctcttgtaagagtcatatcgaaatgctttggtccctctgctgtagctgtgatgaatggaaggttgatgtttgtagtagtagctgaagacagctccttctttgccttctcagcagcttcctttaatctctggagtgccatcttgtctgtagaaagatcaacgccctctgccttcttgaactcgtcaatcatccactgtgttaccttgttatcgaaatcatcaccaccaaggtgtgtatcaccgtttgtagataatacttcaatgactccgtcaccaatctcgatgatagatacatcaaatgtaccaccaccaaggtcataaaccataatcttctgctctttctcattgtcaagaccataagcaagtgctgctgctgtaggctcgttgatgatacgctttacatcaagacctgcaatcttaccggcatcctttgtagcctgacgctgagcatcgttgaagtaagcaggtactgtgataactgcctctgtaaccttctcaccgaggtatccctctgcatcagcctttaacttctgaagtaccatagctgaaatctgctgtgggctgtagctcttgtcatcaatctgtaccttgtaatctgtacccatatgtctcttgatagaagaaattgtcttctcagcatttgtaactgcctgacgctttgcaggctcaccgataagtctctctcctgtctttgtgaaagcaactactgaaggtgtggttcttgcaccctcctggtttgctataactgtaggttttccaccttccataactgctacgcagctgtttgttgttcctaaatcaataccaatgattttgcccattttattttcctcctattaaatatagtgtttttacatgtttcatttatttgtaaccatccgttgtctcacatgaatcccttaaatgctgtctgcattcatataaatctgattcactgtcatgccggatagatgtacacatcattactgtactaccgataccatgctgtggcgtaccactgaatccttgtacatatagcccttctgaagctcctgcgctacggtgcctgactcaagttcatcattttcaacctgcatcactgcattgtggaaatcagggtcaaactcctgtcctacgcactctattggctttacacctgcagcatcaagctctgtgagcatctgcttgtagaccttatccatacctgtgataaaaggatcatctttcttatcatccggtactgctgcaagacctctctcgaaattgtcgattacaggaaggattttctcaactattgtctttgctcccatgtcaaacatctgggatttttccttctcacttctcttgcggaagttctcgaactctgccatctgtcttttcagacggtcgttaagctcttcaatctgctcatccttcttgtctttcttctttttcttgaagagacctttcttttcatctgacttttcatctgcttttgcatcagctaaagcatcatcatctgattcagtttcattcatatctgtatcttttgcttcttcggctgcctgagtgctttcctcatcagctccttcaatctctatctcttctgctttgttttctgcagtctcattgtcgattgcttcttttttaatatcctctggcatttttgaccaccttcctatgtttcatcctcagacttcttataaattccatctaactgggatttaagagtctttagattatccattactttttcataatccatacgctttggtccgacaattcctatcgttccctttacgccctcacccagatcatatgtcgcagtgacaacactgcagtccttcatggtctggattggagattcatttcctatataaacctgaatacctgttccattgtccttcttctcggaatcggatagggattcagtaacaaggcttgctagttcttccttttcctcaaatgctgacaaaagtgtcgctgcattattggaatccgaaagctcaggatacttcagaatatttgtcgctccgctggtgtaaatcttaagatcctcactctcagcgaaggtctgtgccaatgcatcaatcacatcagagacaattcctgaatgaataccagcgcgttcctttatgcttgcaatgtttccaagattaatctcgttcattgcgagtccgtttaatgaggtgttaagcagaatgttgagcttaagtatcgtctcattgtcaagcggctcatataaatcaagcatcttgtttctgaccatattattgttcataacaattactgcaagcaggtgctggtcgtcaacctgtgaaagctggatgaatttcaccttgttgtgattgacatccggtgcagaaacaagtgtggcataattggtattgtttgcaagtaccttcgccgcctgctttaacacctgctccatcttctcggtattttcaatgaccagctccttcatatcagaaagctctttttccttcttatcattggtctctataagatggtctacatataatctgtagcccttatccgaaggaattcttcctgctgaggtatgtggctgtactatatagcccatctcctctaagtcgctcatctcatttctgattgttgccgagctcagattaagatctgtatattttgaaattgtacgtgagccaaccggctctcctgtggcgagataattgcggatgattgcatccagtatggtaagctgtctctcgctcaattctagttctttgttttcattttccattggtcacacgctccatctgaagtatgcttttaatttgttagcactctgtattttggagtgctaattttttatctgtacataacataccaccacctattagcaatgtcaaccctcgagtgctaatttttttaaagtaatttttaaaacccttgattttacagggtttccaggctttattaaatttatattaaattgattttggcgtttactgtaccattactgtaccatttttttcaagtttttttatttcaagcttagcatcaaatgcattatttaggtgattatacacgtctaatgttacatcacttttagcatgtcccattatatattgcgccgctttgatgttcacacctgaccttgccatgttagtgcatccggtatgcctcataacatgagaagagaattgatgaataagaactggctctcttttctctttagatgcctttttcagctcatactcgttataatacttaactacattatataaagcattgtttacaccattcggcatcataggtcgtccgtgcttcgttacaaatataaagtctgtgtaaccatctatcgtaacggagcatattttccctagttggaaattctgcaactttattgctctaaacgcatcgcaagcagcgtctgttaacggtattgtccgtttacccagagacgaaaagtcaaggactttttcatcaaatccaaaaagaagtcacattttgcggacttcctcacggagcagacgcttgattttgtcctccattgtctcttttgcggtctggctgaaatgcacacggacgatatagattgtcttgccgatctgctttctgacagtcgggcaagtggcggtgttggttgcggtattgttcattcaaaatcctcctgtaaatgaaaaatgcccggtgactgttcatcatcgggcggtgtcggtatgagggaacaaggcaaggcggcaacattaaggtatctataaaacccttgccgtctttgccacgcttgccgtgttcctgttgtcaatctcggagatagcagacccatgctgtgccgtctttctcggtcacaagtctgtccccgatacggctctttgccgttctcatggtgcgtgaggaaatcccacgctcattgactgccttttccagctctgcactcggcatacgctttccgtccgcaagcagttccagaatgagcatttgcgcctgtgcggtcttgctttcggtcttggcggtgtctgtcccggcaagaagctcgtcagcggtaatgtcataagcccctatccactcaaagcctttctcgtctcccagagaaaaggcaagggactgtccgggcggcgcaagggagcttttctcatggataagcaccctcgttgtgggactgtccttcagcttgccgataaagagcagactgcggactgccgccgtaatgtcgatagaccctaatccccggtaggtgctttgcgttcctgcggctttgttcaggtgtccaatcagcacgataacgcacccggtagcctgtgcaatgtctcccagactgcggaatatcgggcgcacctcgtttgctctgttcatgtccacatctgcgcccagaaacgcctgtaccgggtcaatgataacaagccttgcgttgttctcccggattgcccttgctatgcgctcatcggcaagggtcagcggtgtgtccctatcgtcaatgacaagcactcgttcaaggtctgcgtcagcttccatcagccggggcttaacggtatcgcccaaaccgtcctcggcggtctgatagatgatattaaaaggctcaattgtttccataccgggcaagggctttcggttggtgcaagccgccgcaagacgcatggcaaagtaggtctttccctcgccggggttgccctgtatgatcgtcagctttccaaaggggatatacggaaaccatagccaatccacgctcgtcagctccacatctgccatacggagcatggggacaggctgggcggtgggcagctctcgtagcgtgattgtttccgctataaatttgcggctgggaatgtccccttgctgacggagaacatcgttccagtctttccttgccgggacaaggcgaatgacggcgatctcgctgggaatggactgtgccagtcgggtacaggcttcgcttcctgcggtgtcgctgtcaaggcagaggaacactttttgggtgtccttgcgttcagaaagaaaacggtcaagagctttgcccgaaacgccgcccagggcaagataatttcttttctgccagtcctgcggataaaggcagatgaatgataacaggtcaatcggtgcttcaaagacaaagagctggttgccgtttccctcatagcggaacggataggacttgtcagacccggcaatgtcctgtctgaatgggtctgccgttcctcgcacatgggcgtatctcggcgtaccgcttcggtctctgccgacaaacacaacattgtgccgctttgcttcctcgtaaatatccccggaaagaagaaaagcctcaacaagcgttttgttgagacctcggctttcgcaaagaaattgaattgctctgtcggctgttctgttgtgcaagggcaagtgaaacgctgtgggcggtgttgtgctggcttcggtctgcccctcgccgctttcgccggtcaggagctggacagcttcgggaaaggacttgccgtaaaactccatgacaaaatcaatgggatagccgcccttgctctggctgtggcgaaaccacttgtttccccggacggtcaggctgtcatgttctttccagcggtattctcgtccgcttttgataagcgtctctccctgtgtacggagaaaatcttccagactgacggcgttcgcccgatcaatctgtggttgggtgtaattcatcgggatatatcctcctttttgtgtcgtgtttggggtcgattttggagcatttgttcctctgtacgctcgttaaatcgggcggcagtatctacacatgacttgaccttccaaagacggtgtaaatcgtctctgacggtcttaaactcgccataggtggtgttgtgcgcctgttccagctcgtcatactcttcggtcagctttttcatatccaccttgccgtccgggaattctccggtcagcttgcgtctggcggcgtagaactgtttcagttccgtttcatgctctgccttgtacttggctctgggcttctcaaacttgattttctgcaagccgtcatagacaggcttcaagctctggaaagcagcagagctgtcatagagccgcttaatcgctttcattcgagcggtctgttcgtccagcgttttcttcaagctctctgtggcagcactgtgttcgctgacacggtgttccaaatcctcaagggagtaaatcccgtttgcccggagataattgaaagtctcattcatctcctttagattgctgaccttgtctttctgcgaatacgccccggctctgcgctgggtgtaataggcgttcagcagagaaacaaggtcgggtgcctgcggcttggcaatctccgcttttgcttcggcaatccaatcgaacaggagagcgattttcttcttgatgtcccggataacggcattggttgccttgatccagcggttgaactcgcctttctcggtgcgtatgcctttcttctccattgcccggacggttgcgccctcgtggacggtgggaagaagctccacgccctgacgctcatagcttcggtggtcgatacgaacgtcaagccccttttccgcaaacttgccattgcatagctccgcccatgtctgccgccagtattccagcgtttcgggactgccccagtcggtagtgggaacggcgttgaacacaaactttccgtttgcgtctcgaatacggttgccgtcctcgtccagctcatacacccggcgttgctttagcccccatttgccgttctgctcgatggggcggatagggcaaagcacatgaaaatgtggattgggtatgccgccgtcctcacggtctggctggtgtacggcgaagtcaaccaccatgccccggctcacaaagttctccaacaaaaattgccttgcaagagcgatgttttcctcaagggaaaattcattctgcaaggcaatgtcaaagctgtatgcaagctgggcgttctttccacgctcggctttttccacggcgttccatagggtctggcggtctgcgtattcgggcggtgcatgggacggcaggagaatgtcagagcagatcacgccgccctttctggtgtagtcgctgtatttcgccgtaatactcgctatacaatcgcgccccggctcggtaggcggcagaagcgatagcggactgtcctgcgcttcgcttagtctgcgtgacgctcagatgaaatagtgccatcggctttcaactccttttctctgttcgcttggttggtgtgagtaatcgccatgtgacggacggctcgccggacttcggacagagaaaagatgtgttccatcagctctgtcatttcggtgcgtgtgagatctttgacctccggggcaagactctcaaccgtgccgcccagattgcaaaggcggtgggtgcgcttggtgcgttcgcctttctccagatacttctttctattctcaagacgctccagcttgtgctgttcctgtgcaagctgcgtctcggcttgctccttttcggcttggagctggtcgagggttttcggttttgtcattgtaattgacctccttttttgattttggggataaaaaaagaccgtcaacttttcgcatagtgcgaccagtcaacggtcagtttttcggtattcagttgttgtgttcagttcggtaaattgaagttggtcaaagttgttggcgaagatattccacaacatttccattcgtatcatagaaacagatgtttcctacattgaggggcaggacaatggcgaaaggcttgccactatcaatatcaatcacctgaatgccgttgccatcatctacttcaagtcgaacaatattttgggtattcattgagataaatgccctttcgttatttccctcaacaacaaactctgcaatgtaatcatcaacctcaactatatctccaccaccacggaagaaatatccaaaagacaagccagggcgatttacatagacagaaaaagtgtggtctgtcttgtcctgtgggtaagaaataaatgcagccattgtgtcggaaatgcttccatcaacaatccaatcatccaaaattttttgagattggcgaatgtctgcttctaaactgtttgcggttttaccaatgtcattgtttgcataaaggaaaccgaaaaccaacacacaagccaaaataacacccaagaggattatgggtaatttctttttcatagaatcacactcctttatcaaattaagattcttgattttcaaacttgctggcggcgaacggtttgtcaaaaccgtttgcggacggcaagtccacaggggatagccgctttagcggcgcaagggggtgtagccaccttgacggaacgaagtgacgcaacattctcggtcatgcagttttcttctgctgacggagaatgaagctccgcaggacgcactactctcgacagagagtatagaagtgcgccctttagttcctaaagggattttatcagtgcgacaaacttgaatttaactgtctttgctaaaaaaacctataacagccataataaatcctacaggtattaaaagaaaagacgcccacataataccaatgtatatcagctctaaacctgcaagaatcattattgcaatacctaagagcattaaactgttaccaaacataatttttttcataatgcttttcctccacagcttccgatttgttgctcaatttcgtattcaaattataccataaaacttgtgaacaattctaccgcaactttggactatatgagaaaagtccgaacagttttctgcccggacttcctcgctcaattataaatcaactctgctttcacaacttcctctgcctgcgccttgcaagcgttcatctgccgcacccattccatttggttttcagctttcagttgctcggtcacgccgttttgctctgccagtgaccgcacgatcagctccatgcggtttcgtgccgcttcttcaatctcggcgcaatgttcaaagagcttgtcggatagcaccagttcattgaacagtatcgggcggtgcatttctaaatacgccttgcgaagtctgccgtagtgtccgatgggcttggtcttgcggataatgatgttcgggataagataatcgccgttccgtgtgtaagtgatattcatgctgtttgtactcctttcatcggctctctctgcggtaaactgctgacgggaacgaacacgccctttgcaatatcctccgcacgaatggcggctttcttggcttcgatttctgccttttttctccccttgattttgtcctcgtatcgcttctgcgctccgctggctttccgcttcaagtagttctgatgaagcctgtctttgcgttcctcacgcttgcggatgatagataccattaatggagccaagacttcagctatgatatacagcatcgcagaaacagcaaaagctaataacctaaaaccttatgattactttgagcatcttctggagtagataccaaagcatatggaagatacagacagaagttttttgaaagaattgcttccgtggtctgataaacttccgaaacatatcagaaaatagaggggtatcccacagtcgccatgatggtggctgtagaatttagtggatactcactatggagcgtttaccctgcatatccttaaaaatatcgctcatttcatcactccaatctgaaattttgagtatagaaaaagcagtcaatcctaagactaactgctttgtgtataggtgtataaaattatcatattttcctaatgatttataactgtttatcaaaatacataattgcaatcaattcaagcaaattacgcaaaccaataaaaagttctccaaaaagaattactcggtcaagtgtaaacataatttgaatatctataaataatggtactgatgttgcaatcgctaataatataatcaatgtccaatttgctatattagcagactgatttgcttttagctgtatcgtcaaccagcgttcatcacccttatattcaacttgcttttttgctttcaatatataaagccacaacgttgctcctaatgctaaaacaagaaaaatcaagataataatttgctcattcatactatttgtcctccctatgctcgaaaacttcatcaatagaaacaccaaatacttctgcaattttaaatgccaattctaatgacggagtatatttatatttttctattgatataactgcttgtcgtgaaattccaactttttcagctaaatctgcttgtgtccagtccctttcagcacgtaaaactttaattctgttccatatcaaagttatcgctcctctccaaaatataatgtactgattacttttattgtaatgtactcattacattttgtcaacataagaatacatatagaattatgatttaaagcatttggtaaatagtaaccagagaatcccctttgtaacccaagaatccctctttgtaaatgaaaatcctgttttgtaagcgagattcccggtttgtaaatgaaattcccggtttgtaagcaagattcccgaattttcatttctatttcgatatgatataatacgttcagcaataaatttgcgtacaacaaccagagatcaattctctctcgaaatttttgtattcggagaatccatccctgtttttgattggatagagttgttctattctggctctgacggcactcagcaaatttatttgttactttttgagaagtttaggctttaagatgatgttctcggcggcaaccggtgagcatcccagtctcttaagcacatcttctccatagtaaaagctgaatgtttcgtatgggctacggttgttcagcttttttcttttataagaattgatatggttcatcatcagagtaatatcctgttgtgtcagctcatcgaaactgcttccttttggcaggatacgacgtatcaattcatggttgacttcacaggctcctttttgataaggagcacttggatcgcaataaaatatctttgttctattgcatggaatggtgctacgtttttcgatttcctttggatttgaaaactcacttccgttatctgtcagaataaccggaaacaagctattaaatgtttttgccccaaggacttcatccaataagtttatgatctctattacagaggctgatgtatttgcgtcccgcaaaaaagccagcatgagactgctttctacaaagtgtatggtaagaagacattttcctcccacacgaccaatcacgctatccatttgtacaatggtcgtttccgggtttgctcccagatatttttgaaagtcagcgtagcttcgttcaatacggcagccccggtcaactttaaattcaggcttcttataacggggacggtatttcactttacggggcagatcaatgttcctgatatcaaagagctgggcatccacgtagttatacaatgtcttttcactgcacatcagttcatctacatgagcaagatagatttgatgaagcgactgcccgtttttaactaaaggactgatgatcccgttaattcttgcaatatcatcttcgttggacatgataccggttctggcttccgaaacagcatgatgtgcacgctcatgtgcatctgccggatcataaatacgttttaataacgtgcatttcggcagctgactgcaaccattacaaacatagccctgccatgtgtattctgaaaattccttgtgatacaaaattaactttatttgtatcataatatgtcggtaataattcttttgcaaaaatgcaaagccaacttgcaaacaaaagcattaacaaagatatatacaaactatctcccatttgttctatggaaattccagaaacagttaataatattgcttctataactaccacaccgattgagataagaaatgcaaatatccagttcttttttcgttgacgaattgtatcacacaacgacaagtctaacgagtttacaacaagagtttctaccacatcactatttaatgtcttgttctcttttaatttttctccttgtaaaagttctgttactgtaatatcaagtacatcagcaatagggataagtaatgtaacatttggcatactgtttcctgctcgtgtcaactccagaccaaaaaaaaattgattttttgtaccctcaaatatcacttcccattatacctgctattgcagtatattgaaagcaatatttatacttgcagaagaaaggagtgccacattttctcggcactccaaactctgtaaccatccatcttacttgaaaaatggatcatctgtattccatacaatctctatattgtcctctccattgataatcacttttttgattaccttctggattttctctctgtcaaaagattccatattgatgatactttctaactgtgtctcaaacttactagaagaattatcttctggcggtatttctgttttaagctgttcgatttcctgatgcaattcatcaatctgctccaccatcgcctttgaacgcttgacatactcttctcttgtgagcttgtcatccttataatcagaatacaacatcatctttttactgctgaggctcttcaccttcttttcaagtgttgcaatcttttcttccggagatacttctttcgatttaccggctctctttattcctttctcatccagataaactgttgcatacatatttacagttttcatgattgcatcttcaaccttggcaatttccaccctgttgcttttgcatggagaattttcctcaattctggacgagtaacaaagaagaatgtcaccttttacccttttgctgggtgctaaagctctgccacacacaccacaataataaaatggattatagtttctcttaccacgctttgaacgaacacatttttttgaattagcgtgtgccatatcaaataattcctgagtaataatgggttcatggcaattttctatcaccatccattcgtctttaggaacatagcttgaagtgttattgctgcctaccctcttctttgttttattccatatcagttttccaagataaacttcatcgtttaatatatcccggatagaagaagtactccacagactttttacttcaactgcatggaaaaagtttctgcttccttttctctttttgtatgcggatggtgtatcaataccctgagcattcagataatttgccacttccgttttacttttgccctgtgcggtcagttcaaatatcagcttaaccacttctgctgcttccggatctacaataatcttatgcttatcatttgggtctttgacatatccataccttaactgaccactgatgttctcacctttcagtatccttgtgtgcattgcagaactgactttattagacaagtccctgctataaagcatatagattaagttcttaaacgcaacattcataccgcccgtcgaaccatcatagttatcgctgtcataattgtcattaactgcaataactcgtacctgataaagtggaagtatctgctccagaagactaccgacttcaatataatcccttccgagtctggataaatcctttacaacaatgcaggatattttatcagctcggacatcctccataagcttcatatagcctggtctttcaaattttgttccggtaaatccatcatcacagtattcctgtaccttcgtatccttaagctccgaatgattgccaataaatgattctaacaattctctctgactggatacactgttactctcttccttctgatttaatgatacatcctcatcttccatagaaaggcgaatatacatagcagttatcttactcatacaaatcaccttctctcttattctttacctgtaacagttcttccaggcaatcatcatacaccagatttacggaaattcttccatcttcaaacacctgtaccttgtcaacaaatgcatctgccagctctttgttaagctttctgcatttcagatatttattgataaggttttcccagtcttcatcaatcttataattctttgaatacaggttctgagatactaaaagattatcaatctccttcttcaaagcttcgctttttagaagatactgctgttttaatgtcaaatattcgctctcattaatcaaatgttctgagtaatctccatataactcagagaacttgcggtttactttctccagttccctgcgctgtctggtaatggctttttcatacacatcgtattttttcagtccgctgcttcttgcatttaattcccgtatcacttttaatgcgtcaatacagcaacgcatatgatttgaaatctgagcaaagacagctttgttgacttcctcctgatcaattttgtgtcttgaacatgccggattaataccatctgaaaaagttccacaaaaatatacatacgattttgttgttcttggagaaagtctcattcccttgccacagtctccgcatacgatttttccctttagcagattcatttcattaggtgggtgttttgtaaactcttttgcaaaataagcatccgagatttcctttactctttcctgtgccttttcaaatgtctttttgtcgataagcggctcatgcgtattttcaacaacgacccattcacttggatctgttgcatggagtggaatattattgtatttctcaattactactttcccatgcaccgccgaaccaatataagcctgatttgtcagtattgacttgactgttgttttggtccatacaccattggttcttacattctgctgataaccaagagattttaaatacatcaatggtgacattattccctgctcattcagatattttgcaattggtgtgtaacctttgccatctaaaaacaatttataaataaacctgacatttccagcagttgcttcatccacaacaattctgttcttctccgtcttggatttcagatatccatatggagcaaaaccgcacatatattcatcagtagtccattttctacgatgtgcagttgaaactttctttgaaatatccttagcataaaactcatttacgatgtttttcaaaggcatcataaggtctgtgcccggtctgaacgagtcaaaatcatccgtaacagcaatgaatcttacattgagaaaaggaaacactctttcaatgtagttccccatctccacataatttctgccaagtctcgataaatccttaactataatacagttaattcttcctgtttttgcatcctcaagcattcgcttaaaatccggtctttcaaaattagtaccggtaaaggaagcatcataatattcctcttcaattacaatatcttcgtgatctttaacataattcttcataagttccatctgtgtttcgattgtccctctctcaatgttctcttccttttcatgggacagtcttgcatataatccagccttaaaaagtaccttcttctctttatccggtaaggctgtgttttcctgtagcatcatattttttctgctttttcttgccatattacacagcctcccttctgctgatatttaattgtccacccggttctttatctacttgataaccaagtttttcgactgattctaataacttcttataacaatcatcaaagtcaaatacgatttcaatctctttattctctgaaacccttacctcagaaatcagttttacaaccacgtccctggtcagttccttaatatccttgtattcggtaaaataattcatccagagatgcttatcatccttctcctcaaaaattaaagcaatgtctctctcaatctggcgaattatttcttctccctcttttgcttttttcagatatgcctcatgaagttcaagatattcttctttagtaagaattccgtccttcatatcttcatacagtgaagttttcagtcttttacacttctcaacttcctcaagttttttctgttttcttgcttcaagactttttacatcaagctgctggaaaggaattgttccaatataatcaagtatttcttccagattcattacgtttttgatatgaagctttaacatttcaagcaccgtatcctctaataacgatactgatattgagtgctgtgaacactgctttgtcaatttatgattagagcagatatagtaagcgtatttcttatcacctgctgttgtaatttttcttgtcattggtgaaccacagtctgcacatactgcaatacctgaaagattatagaccatatctgaatccggagatattctcgtatccattcccaacaacctttgaacaatctcaaaatccctgtcattaataatcggctcatgatttttttcgattcttatccagtcagattccggcttaacaacctcctgcttcactttatgatttggtgtcgttcttttgccttgaacaagatttccaatgtaaatctcattttcaagaatcctgcggactgtgactgaactccataccgacttatcattctgtaaaaatccggtctgataaccgctccctgtactctgcttatattccataggtgcaagcacaccctcattattcaactgtgttgctattgcatcctgactcattccgtgaagctttagccgaaaaatttccttcacaataccggctgcataaatatcaataaccagcttatgtttatcatcatccgatttttcatacccatagggaacaaatgcaccgatatactcaccattttttctctttacatccaaatggcttcgtatctttatactgatatccctgcaatatgcatcattgatcaggtttttaaacggaataataatctcatcaccctgtgactttccagtcacactgtcatagttatcattgattgcaataaaccttacaccaagagccggaaataatctttcgatgtatcgacctgaatcaatatactcacgtccaaaacgtgaaagatcctttaccaccacacaatcaattactcctcgcttaatatcttccatcatcgtctgaaaagacggacggtcaaaattagagccggaataaccatcatccacatattctttaactattctaatgtcttttttgtctgcaaggaaatttcggatgaaatccttttgatttgaaatactattactctcagcttttgcgctggtagaaacatcgccatcctccttagataatctaacgtagatggctgcatgatagatttttgagatttgtttactcatatcgcaacactcctttaaatattctacgtcagatgtacccaactaaaatatcaaaggaagttatgccatattcatttagtccttgaacatatcatagcacaactccctttcattttccatatgattctgaaaaaagattctaaactgtaagcagcatattcttgaaagcttcttctatggaaactccattattggcaaagcttactttaactttcatcttccccactctcatcatatagggatttccaacttttcttataaacttctgctgtctcttttcaatcgtatcattcagatcagcatgataagatgccatatcgggcatttcattaatcttgacatcactaaaatcagtatcaagcaatgctctgtattcttctgctgtcataaaatctatccccctttcagtaaaaatgccacccataaaatacaggtggctatgtaacccggagcaaatgccccggtaatatttaattgtacttttcatatgccccaatctggatttttacacattcagtaatcttatcaagtagttccgtatctgaaattgaagcaactaccctctcaatctggacatttacatcaatggatacaatctgctcacataatgccatactgtcaaacacctcaaaatctgtgtcagtaacctttacctttgcagccggtattggacagtgggttggcagatatttctttttccatgtttttgtggacatggctactgctgtgacaaccggtgaatactgatttgccttgttatttgagataataatataaggtcttgtatacttctgaatgctccctttacttactgactccagatttgcaataacaatatcgcccctgttcagtttcatctatgtcattcctcctgttccctgatatattcttctgcctcatcctctgtcggacaggcaacaatccgtttcccatattcatcaatcactactgtttcgcccggaaatataatcagttttaattttctattttcttctgtcatatcattcaatcgagtaggaggaatttctcctaaatgagaaattccgacctctcacaccaccgtgcgtaccgttcggtacacggcggttcaatcaatttaacaagtaacacacctttcagtatagtaatctaacatagaaactaatccaaaacgggttagtctttctttatttattgcaaaattcataactcttcgctgacaaacatatgctattcgattacccgtataggctgtaatccttgctgtatccttatctactccgagttttatcaagttatttatgcggttctgcggagttttccattgtttccaaatgcacatgcgcagtctgcaacgaattcttgcgtccatctctttacaaagtgttttcatactacctatcttgaaatagttaatccaccctctgataagctgattgagtttcatcactttataactgttgctaacgccccagctacggcacgtgagctctttcattctcttcttaaatttcgctactgattttgcatgcggtttcgccttgtattgatgtgctcttgtatcaaagtagaatccaaatccaaggtatttaagtccttgtggtctgtctaccttactcttggtcatgttgaccttaagccccagtttctcctcaatgaatcgtgaaatatttctcatgactctgttggcagacatttcacttccgaccataatgatgcagtcgtccgcgtatcttacaaagttaagcccacgcttttccatttctttatcgagttcattcagcatgatgtttgccagtaacggcgagagatttcctccctggggtgttcccacgatagagtcctcatattcatcatcaatcatgattccactgacaaggtactttcttacgatagagataacatctccatctttaatagttctgcctatgatagtcatgagcttatcatgatttactgtgtcaaagaacttttccaagtcgatgtctacaatccactcattaccgtcattcatcatttcaagtgctgttagaattgcttgttgtgcacatctgttcggtctgaatccataactgtggtcatggaactgttcctcatagattggcgttaatacctgtgcaatggcttgttgtacaaatctgtctgtcactgttggtactcccaggtttctgacaccgccatcaggctttggtatctccactcttcgtactggctgaggtttatattttctcgccctcaactgttccttgatgttttcgccgttctttgcaagatgttctttgagttctgtgtacttcactccgtccactccctctgcacctttatttcgtacgacttgcagatatgccctgttgaggttatcgctagatagtatctgctccattagactacttgtgtccatgcgttctttcctttccgtctcgcttgatttgaccaccctttacccgattggttacggcagatgaatgtctcctctgcaatacgagacctactcaaacttattgattgttcgcccctttgctccatctccattacagagacttcttcactactatgggctctgctgacttctcacagttcgttgttactaggctaatggaacctctgtgagatctccacgcttaaggtgctcgctctttctctccatatatccgccacatttactctgctactacaaaagtgatagttattagatttcgttgttctttgccaacttatctctcgtagcctagccttatatgtgatttctgtccgtcggaccggagatttgcttacagcttccttcagattccacctcacggtggacacccttgctgttcggctatacacttcccactatctgggcgtgttcgggacttacacccgttagagcgcgcccatggcgcgcaaacaaagaaatgagagcaggttcatagcccctgctctctgcattaatactgattccatgttccgctgcaagtgtcattacagctttaatctcattaagttccattgaaatgtctaccacatctcttaccagcacacagataatggcatctctttcaatataatatcttaatcgttcaactgcttttttatctgtattaaaaattgtctcaacaacttccatgccggacttttttgcatatgcctcgatacggtcagctgtatcatttgcattattccttacaaatatcagacactgctttttttctctggaatcctgcatattgcctcctatctgccgtccctgatgttatgatagaactttgataccgtatcaagtaccagccctcttacatcactttcctgaacaggctctttgtacatcatctcataacactcttcaagttctccattaatatcctccacatagatatcatattcgctgagttttccaagtgtatcaataatggtctcatctgttgcaccaatcatatcctttgaaagtgttatgattgtattaacatcttcctccatatttaaaccgataatggcatatttcatcggaaatgaaactccttctgtagaagcaggctctgaaagcatagctacaatttcatagccattatccttacaatacttttcaagcaactccggcacaaaatgatctgtagcctctaatcctgtttttgcataatatataattgctctttccatcttaaaatctccttataaataatattgatttgatactgtgcgcactttatctcctcacataagctgacttatctgtactctccacaccatcacacctaaacatttcttttctgtcggtgaccataaatcagtttgtgtgggaagataaaatactatcttcccggtttcttaaccatccccgtatcgggtaacatatcctttgccagccacaaacacttcgtagtttcctgcccatccagacttacgaaagtagccactctctgaaaatgcgttttgctgaaattcaggtgcacttattatctcattacctccggctgctaacccggtaggcacaaccctctgctcttatccttaaaggctcctgctgttacgtttctcataatcggctacagctctgaggatagtcatcgcacgaaatgggattctgccaccctgtcatagacaaggcgatataagctcgtgggatatgcgtgtcctattctgttttcaatattcaacggctcttttctcagaacctgaacaaagtataactgacaccacgcatcttctacagtaaccgacactcttttgaactaagagtaacactcccacctgttccaaatccttataaaaaaagccggactgcattatcaaaaatgcaatccgacttttttattctgtcagaagtttcatattgtcaacggcatttaataccatattccggataaactgtacttccttctccttcagaccaaccagcagatcatcgacttctgcctttctttcacacccacacacaagataatccaacgttatatgaaacaattcagcaatactaatcagcgtatctatttttgctccatttacaccagcttcaattttccgcagagcatccactgacaatccaatctgctcggcaagctgctgtcttgtcattcttcttgccgcacgcaactcttttattctttctccactattaacaatatcgtagtacaccttccactcttttccggcaccttatatatttgcttaagctgtattcattgtaccgtaagcgaatcttttgtaagagtgactaaaccagctatttcaggtggaatattgtacaccttaataccaagaatataaatatttgcggattaaaaaagagatatttccaaactctcattacattttggaaatatctctttacttaatatcctcatccggcacaaactccatgatgtcctctatcttacaatcaagtatggaacataatctgttaaggattaccgtttttacgaccatattctttcgcaatcgctgtaactgtgctttatctattccataatctttaattagtgcatactggctaatatttttcttcttgagtgtgatccataacctgtcatatactatcattacaaagacctcctccttgtattctacgcaagagtgtcctataatgatatggtgcgtgtatgcaccatactgtatgtatatgatagaatagaaaatagccataatctgcatagaaaacagctctcaaggttattatgtaatatagaacggattatctgttttacttttatggtattcaaccgggacaattcaagcacctgacaatttgaccgcaaatacccttctcagaaaggattcacaacaacactatgaatgataaaaacacatactctgttgataaatatttggaaatcattgccgaaaaagaaggaatcacaaaagaagaagtccaacaggaaattgggcgggcagtttccattgctttaaaaagccctgatccaaaaatgcaacgcttctggacagactttccatgtgaaaatgatactcccaccattgaagaaatcatataccatctcgctgaaaaatttgcaaaagagtcatagacaaaggacaggataactacccgtctattcactcagataatcttcctgtcctcttaatatttgttcaatcatatgtaatgcaaattctatttctctttcgtcacatcgattcatcataaatgcaaaacgctcaatgtgtttttctgggtgctgctggctcatcaaaaccataggcgatgactccaatgcatgaacaatattcaaatatgtatcaagactcattgcccttctgccattttcaacacttttgatagtatccaatgatacatctgcccgttctgcaagctctgcctgtgtaattccaagccttctgcgttcttttctgatattctctgcaataatttcgtatatgtgctctcttttccccatagccccatcatcctttctgacttatcgcattatatcagaaattattatgggttttaggaaactgtaatcctttgacattttcgtgtaatactttgcatattccttctaaacaccaatctacttttacactgaaatttaaaatttcagcaaaatgtatataacaacatgagaaaagcccgtggcagatccacgagctttatctccagtttgaagcatggatatagatagttccctgcttttatttagtgtaacatacacctttacttagctacatgtgtaaaatcccagtgcgaaaatacgtctacatagcaggtttttgtttcaaccacatatctctccatgccgcctaatgcttcattatatctttctttatattttgtctcaacgaccttatatgtataatacataggacgatatttgattaaataatgagatccttttggaacagttacggagtatccgctacctaaagaatatgattttgatgcacctagtgtaacacccaactcacttcctatagttccaccatttgtatatccaccggaaactgaagctttaaaggaaatattataagaagtatcttgagtgtaattcaatgataattttgcgctagatgtagaactaccaccactcgtgccatttctccatgcaccactttttaaactacctttggtatattgataaccatatacggtaacaaaatcagaaatgcgttcttcattttcctcatcagctttaatttccgtttcaaaataatcagctccatcatgaggcaaattttcagtgtcatagttatgagtctccgcagcaaacgctgttgtcgagcaccccaaaatcaatataaaacttaaaaccatactaattatttttttcattagaagtcacccccgctttgctttaaaaaaactataaaccagataaataattgccaaaatgatactaaaaacaaaaaagccaccaatataaataagaggacttttaaaaagataatccatgttattggtaagatatccatttcctgaactaaatccagttattgagtcaatatattggacaataatggaaagaaacggaagcgtacttaaaccaaatatgccaaaaattatcattattatagctaaaatcttcaaatgaaaatctttcatcaaaatcaccccctattttaatatcattttgtcgttatatgcagatcattctataagcatattcataattatatttacttctcctttcctcagtattcaatgtgccatatagagcaatctgttgtatattctaagaatagcaggaatcaaagcaaaagaaaatatcctatgcagaaagtgacctgtttttgcagaaaatgaccaacagaacaaaaattactcagaaatcaagtaaaaaacacagcattgatactatttcaaagctacagttctgctctaaagaatatattgagagtacgctttcaacaatatttcctagtctaaaaacggtattagaagaattttggtaaaaatttagcaggcaataatttgaatattattgcctgccaaattaatgatgaaatcatatgattcttctgtcaatcagaaccaatctgctttctcctatcggagtccaagcatacacactcttgcaatataacgtatcatcagctccgagcctgtgctttctgtatattgtctgaccaatacttattgctgaaaaaattcccatttctaggcaaatttctgaacatatccataacaatatcatatgataagcctgatgtgtccacaaacatctctttcccatctttagatttaactgcaattccgttatcacccacatacgctactgtattgtcatctaatttctgtattaatcccgtcatttccgcaaatttctttagcgcaaactccccggattcttcacaaagttttcggaacttttctgcatcctcacctaccatatacggatattttccatctctaatataccatgaaattcccgtttctgaatccgtgtatttaggatcagttaatgcccactcttccaaaggaacaccctgataccatactgtcattttttcactggaatcattgcttatttctggttcatcattttgaatttctttctcagcaatttcatcctgcccctgttcatatcctctacatgacacgttacactttagtgcctcataaatttcttgaacatttgcatatttgttaactgctgcaacatccggtgtctctaacacttccttttgttgaaaagcctttgattggttatattttgaacctgattttcttcctgcgtaaatattgttatttacagcggtatttaccatatttaccatatttataatccctccagcagcaatataatctaattttcttattatagtatgttgcactttatgccagattgctataaaatgcaacatacaatgaaaatattctgttgcgcttgcttaatatcccatattcaagcagctattattgtgcataagcagcagaagcaatatagcctacctgcgaagacccaacagaatacaactcataatggaaatggtatctaacgcctaccttaacacctgtaaatgtcagtgtccatgaatctcctgaatagttagcaatttgtaccggtgcacttgttccgtcatttcctacaagagtaattgttccctgaagataatctgttccactttcattaggcatataaacatttaagcacaactttgtaacgcttgagttattaatggtgtaataataatttccgttgaatacaccgcttctggaattgcttcttgtaatggttctatttgcatcatactgaatcgtatctgcaagagcaacggcgtcatcataagcaggtactacgtccaaatcgccacaatcgcttacttctactgccttatttgcattaggggcagcctgtccctgagtggatacttcacttgcaaacgcagttgttcccattgccaaacataacatcaaactcaacaccaacgcctttaaactttttactttcttcattttaaaatctcctttcaaattaacatcgtataaattttcattccaacaggaatctataaacaactttatgcttttttctgtctttccagatttagataagtattcatatttcgcatataaaacatctgcaaatcatactttcctaatttgttcatatcctgaataaccttttcaaagctggatataaggtcacatctttcatttaatcccatgtgaccagtttcttgtggaaaagagctgagactattacccctatcaacatcataatatgcctccaaagcactcatttcgacataagaagcatttctcaaatcaatatcgttaatattaatcttttcttcaaattcttttccattttcatcaatccctttggctatcactacaggattatcatctgttgactcttctgcatacttaatataaaacgaaagaccggttccatttccgcctgaaaacaacatatcatccgtctttaaatacactttcattgatgtctgaggaaatgcctcatttccgttaacagatgttttgctattgttttgtcgctttccaaataattcagatacactctgcactcccgaaccaatacgcatttaaccacctccattcgcattataatatgttatttatatgaattaacatatattagtttgcactaaacgtgaataccgttgaaaaggaacgtgtagtattagggaagtttgttgacctgaaagttgtattaaatctataacttcccgcttgcgtaatcggaccacaatcatatgtataatagaagccatctgcgcctgtaccagatataataaatggctcctgatgtatccacgaaatacttcttccatcaaatgttgtagtatcgctgccatatccatataccttgatcgtaacgccaaaatttccatttgtaagccagccatatttataaagtgaaatgcttgtcacctgcggagccggtccatctccaggccaccatagcggattaatcccttcctcattaccactgccttcaactattgttccttcctgatctcctgcaatattcaccgtcattccaccatcattggtttcagaatattcaggaatactactctccttttctgctgctgacaccattgttcccatacccattaacatagtcaatgctaatgcaaatgcaataactttcttaattttttttaacatatcagtacctcctttttatacttgtcatcttggaataaacaattaagttcctatagcatctatggctacagatataatagtaaaacacgccagttaactatctttcacttttcttctggataatcggacgtttcggctgatgaaatattcccatgcatgcaggtgggaatctatctattccatatacagcttcatttctcatgacatgttctacaaccttcaacactttcttattaaccttcttcattctttcacctcctgtttaaaaatttttgctatacacagcaaagctgcacataatataacagctattgccatataactaacgtaaaccatatctgcatctaacagaacacagccaagtattatgcacccctcaagtaaaacaatagtcctcgcagattttttcgattccatcaattcatctgatgtcatgtgcatattaggatgattcgctgtaccaatcaatcctatccctgttatagcaagtagtactattgcaaataaccattgtggatgttctgacaatttttcacttataatcacgataactaaataagaaacaatggatgctaaataacatctataaaacttgtccagatgatatccgccagttctctttcttaattctaaaaaaaacacaagaaaaaatatagttgggagcagcttgtgaaacatcaaactgattacgataatactgccaacagtaataaatttctctatccaacagataaaaacataaacatatcttgcttccatctctttgtcaattaaccttgcttcagtcatctgaccaattaaatcatcagctattttttcaatcatagttatgcctcctgccaaattaagtataactttatctgtttacaaaacaatatccattgcagaaagtgacctttttttgcagaaaatgacaaaaaaaagtgatttgcttgcagcaaatcacttttttaaggttcatcttagtttggcaatataactgagaagtagaactcattattatcatttcgtatagcataagagccttgatattttgttataacctcaattatattttttattccaaccccatgctcatccatttcatatttctttgaggtctgtatttctccatctttaatattaagtttaccatcatatgtattctttacagatataataatgttgtctttctctttaaccagtttcattttcataaattttttgcctgagcacttttcacaagcctctattgcattattcaaaagattcgataatataacaacaatatcctcatcacacattttaattcctgatagatcattgatttgaaagataaatacaatgcctttatccaatgtttccttatatttgctatttaatatagcatcaataatcacattatttgttttaatataatctaactctgtactcaaatttccgcttatacttttcacataatcctttagttcatcataattttccatctctatcaaagactcaatgcacataatctggttcttatattcatgtgtttttttccgttgtttaacaaaattttctgaaatagaacggtacatgtctgtctgatttcgtgctttcagttgaaacacttcattttcacgaatcttaatttcacgttttaatatatcatttatcatatagaacacaactatattcatccctgctaaacacaatgctataaccaagaatacattttcctgcttttgattctcaatgtttccagatgtcatgatcaatgcaataactgtgaagattgtaaaaactgggaaaaaaataaatcgaagccaatctgtacttcttaaaacatccgaggactcccctcctactttcttcctgataagcaaaacaactaggaaaagaattatttttcccaaaaccgttattaaacttccacctacaaaatgcaacctgctaatttctgctatactatcaaaaagagaaacatttaaccatagtgtaaaatagtctacagaaagcagcaatgcctgaaataataatgataagattattgcttttccgaaatgaattttaaaataaaagcacataaacaccgcaacagcaactatagccaatatttgtttcaagataaacttatcataaaataatgaagctattacatattcacataccacaattcctaaaataatactataatttctataattattttttgatctcttttcagcaaaactttcaaaaaatattttgcagcatattacctccaatattatcatcataatactttgaatgtaactaatcagcatctacaattctcctttatacgaaacaaatgtttcttcaacaaatttatatcgtgcttttggaatttccaacttaataccattgttcaataacgcctcataccggctgactttctcaatatgcttcatattaaccagataactttgatgtatccggataaaatcattaccttgcaactctttttccagctcatctagtttgccatatattgaatatttttttaacttgtcctccataatgtaaaattccagtttatgcaatctgctctctatgtataacaaacgctctaatgctacaacctttgcaccctcattaaagttaaatttcttcttttgagctacataattcatattcatgctgattgcatccatacactcaaatattagttccggaaaatttacattatttttcaaaatatatcttatagctcctacgctgtatccttgaggggcacatgtaataaatgctgtaacaaaaactataaaaacatcattgctgacttttcttattttctgtgcagtttccattccatccagttcatccatatttacatccagaaaaacaatatcatactttgccagattgatacctaaacttataaaatcctttcctgattcaaattcatcaatttcgtataatatatcattttcattcatatattctattaaaatatcatgaatgcgttttctaaattgtctttcatcatcacatatagcaattctgaacatatgctcatccccttccacacacaaatttgacatacttctttcatttggttggattattttttgtatattttcctattttttattatatttcggcatctttatccaaaattttaaccactactctatatttgtaatattgcatgttcgtctacaaaattatatatcaatacctatttttaatacattttgctattgcacatatcgtttcactgcaatctttcccataaccataaatactgctaccaggactatacttacatacccggcataaaaataatcttacagatccagacaaaacaaaatgataagaacacatacctgtaatgccgttatgcaatgtgttacccttgcataataccttctttcttcctcatcaagcggtttattgatactttccactggggcaaggacaataataattaccactgcaagaactccgatcaataaaatcacggcattaggaacatttttcattacaggctcatatgtataaaccggaataaataaaattgccattgatatcaaaaaacagccgattctactcttacagtggctgcccccactatagcttctcaacgaggcataaaataacaggaagaccagaacaagtcccggtctccccgtcacaatgccaaatattccagaagccaaaaggtttcctgcaacaacaatgccattttctatcccatatcggtacagttctgcatcctctttttgcacaatccccttttgtatcaatatttcatttatcttctttgcaaatttagcaatcataccctgttaccaccttaaaattttctaagttttttcgcattatccggtaacttgtcctgtccgaaaataaaccagcagcaacggttcatatttgttgcagttaccgtaagggcaagtgctgccacgcttgttaatgctccatgactgagtcggttcatcaatcttcttaattttgacatatgtatatgtcctcctttacatttgatgaatgcactatatcatactttatgggaaaatccggcaaagtgtaacagattgacatttaagtgtaacgctttgcatttattccttcacttcaattccatagagcattgctgaaacctcaaatatatcccctttatctgtaaaactgaccgttccattgtatttttctaccactttacgaacactctgaacaccatgcccatgtcggatattatctttcttggttgttttcaggcttttatttttctttcctgttttgctgtttgttattacaagaagcaaaatccccgactggtacttattttcaatctttacaaaacgctgtccctccggcaccttgctacaggcttctaccgcattatccacaagatttccatacaatacacctatatccccgtgatcaagctgcatctgctttggaatacgaatagatgtttctacttttattccccttgcctttgccctgccaaatttaatacggagcacagaatctacgattggattatcagaatactgcttttcatctatctgctcaaattccttgcacattgcaccgattttctctgaaagttcctgcccatcactattttccaccagatgatacagttcatgcaatttatgtttcatatcgtgctttaacttctgcacttccttattctgtttttctgcttcttcataatagatgtctttatagtgcatttcttccctgtacattgcatcctcatactgtttttgcacaagataattaaaacgctccatcatatacagcataaaataatccgtcaggacaagggaaattacaatactggcacacataagcaggcttttttcactgcccgcctccaatgacaaaagaataataaagcaacagttcaacaccgtaaaggtaaataccataaccagcacacccaaaatttctttcggaaaggcagcaatttgcatccctttctttgaaatcaattttgacagaatatacatcacatttccacgaacaaagctgcatattaccattacaaaataatatttataactttctcccatatgaaaattcatcgcatggagtaacagcaaagctacaggttcaaacagcattccaatacccatgaatgtcacaatatttataattctcgtccacattcctgattcataataaaatgataacagtataagcacaatcaaaagagtcgcaagattcagatacggattttttatgttgctgacaaatgtccatataattgcagcaatggtaaatccagccaatatccatacctttgatactggtttcattttcttattggaatgaaaataatacataaacactgccagatcaaacaggctgatggcaaagcgtatcacatattccatccttaaaccatcctccttacaaactccatatgtttttcttttaaattctgcttatgggaacgggcaatcagaagtctttcttcattgtccatcactacttcatctccctcaatcgccctgatatgcccaagattgatgatatatgatacatgaatatgggcaaagaccttatcatcaagctgtttccatatttcttcagttgtcatatttgccttgaaattttctgagatcgtatgtatcactgcctgacgacctttcttctcaaaatacacaatatcatcgcagctaatacgaaactgattttttcagaactgaaagacaaagtcacgctttatcatatgaagatactgcatggcttttaaaaggacggactccagcttttccactgtaatcggtttagaaatatagtcaaaggtaataacctcaaaaacatccataacatactgcgtatatccagtcaggaatacaaacaatgctttggcatctattttccggatttcttttgcaagctgcaaaccattcatctccggcatttcaatgtcaaatatatacagatgatacatttccccatcatctataacatgcttcagcaactccttcgctgtaaaatacacttcataagaaaactggtactgcgctaacttatcaaaagcactttccagcatttctacatctgttctgctgtcatcacagaccgcaatattaagcataacacttcctccttttcgggcttggaagtaggaagcacttcaatttatctaatcaacttagataaataagccagcacacggtcaaagaactcatttctctgctcctttgtgctgtttgcaacatagtaatccagattaaaatctttcatactgctctcacctgttatcagatatgtaggatcaattccatatttatgatagagtgtcagcactttatctacagatattcccgttatacccgcctcaagctttcgataatgttccaccgtaacacccaatacatccgcaatttctgacttttcgaggttcatattcagtcttgcctctcttagtctctttcctatctgtatattggcatcttttcttcctgtatccaagattttgcacctcttttccatgttaatcatatcaatgggactttgattctcatagtccagaaaacaacccaacgcacatcattttatgctcgtaagtaggttaatttgtgcttttattaaaaaaacgaatggcacatctgataccattcgtctttatctgctttatattctgttgtaaattctatttgcggacgttttttggctatttatcatatccatcactgcatttcttttactctgacatccacagtgtttttaaaattttcaatctgatgtgaatactgttcattcataagcgtggaatgaatcataaaatccgctgttgcaatattattagcaatcggtatagcaaaaatatataagaaactgcaacggacagagaatatttacacactttctgcccgttgcaatttttgtctatttatttttttattttggcaagtaatatcccccttcgtgttttataatgacagcgtaaacagaaaggagatgaacttccatgagaaacaaattccacaactttattgaaaacttacttagcttttatgcaaactttttcacacacagattttaccctatgtaatatgcagttgtcccacaaacagatcttgcagatcattatggtaatagtcataggaaaacgaaaggcgatagacttccatgaaaaataaacttcacaactttattgaaaatatacttagcttttatgcaactttcttcacaagaggatattatcgtttttaaatattatttcatactttcctcaatctgccccgtccgtcaaatcatagctcatatcaagaaaatctaatatcttcgcctcctggactgtcccatccagaagaattgtgatccaattacttttatccatgtgatatcccggcagaaagcctttcatgtgtgtcataacacttatcatatccggcttacattttacaaccataatatcaaccctatcttttgtatccaatccgattttaaagccttccaaattcataaatactgcgtaccattttccattgtcattacgaagtattgcactatctggtaaatcattccacagatattctggaattgttccatattgtttttttacatattgaaatatagtgtctctgtacatactgtgtatacctctgatcctgtaatttcatatttgaatataatcatatcatattttccttatatacagttatttaagatttagcgtattactattggaatgctcaaaataaaaagatgcagaaatgtataattgttgataatatacatctctgcatcttttttgttttatgaattataacttttctaatttttccagaaacgcaacataaaattctctttctttcatacaagctcgctgaacttctatacttttcggaacatattcctttgggtgatctaaatcgtacagtgcctgtttcgttgcctgaattgcagattctgttgtatttcccaaaatgtcgatgttatccacatcgtcttcccctttcatctgtttattcagcctttgtaccatcatctgcgatatatggctcaacattccgtttccctttattcccaagccatttgcatttacttccttagcagcttccatccatgcatcctttacatcctgtggagcgttcgatccaatcatatcaaatgctttttcatcaaagtctacttcttccatatacggatttatattttcattttcctgaacaacacattctgtactaaattgagggatattatcctgcttacgtctagtttcatacagcacaccattcatagaataattagaattaatctgcatagtgcaaatcctccttagtacacattaaatctcaaactcattgtattccacggagaatttgccgaagtggaatttgctgtaaatgttccagcttcatattcacttccttcatatgtccaaagacaataatatccatctacgatattatcactgtcaagatacatcggctctgttgctgtcaatgtcattctaacaccgttaaaatatgcgtatctggttttagcataccctacttctgccgttattgcctgaaaccatgttccaccatgatctaaacgtgagcctacctgcattgaagatgaagaattttgaatagtctcctgccctgctttttcagagttgataagcagtaacttaaattgtgttaaggctggagccggtgcatataattgtattccatcatcagcttccatcaattcctgagtgtatgtatctaagtcaagttcactgagactttctatttttgttgattgaatcttttcagcagcactaactggaacaacattcgtaatcaataatactccaagtgccattacgcttaataacattttaaactttttcatattaatacatcctttctcttattctctaactctctttgaatcaagatttgtatttgtcaagaaaagtttattttatgctctagcttcaaaagacggtctatcctgatccaaataatctggcatctctctcaattcggaacttccattttcttttactgaattatattcactccaataaatagaataaaattcatctttttttgcaagttccgctggtgtcatctcataaccccatccgtttccaagattagataatacttttactccctgatactgaatttcagcaccataaccaccagaagttaaaattgggcaattcaatgtccctcctcccgctagcacaaactgcttttccgcaaaatcgctattttttccttccgctttctccaaaaaatccaataatgttaattctccacatcctttacatttttgattactgccttggtttttcattgtatttttagcctgttcatataattgttttctatcaggtgcaacatctgatagatattctgctcgtaaacaaagaacctgtttggaaatatattcggattctgtcttatttgttgtcgtagctgcttgtcgtgccaattctctaatctcactaacaaattcagcctgcgtttttgaactttccccctttgttggaatataagaccaattcggttctccgttactgcatgaggaaattaattgctcttttccaatagctcctatacctgacaatgatatactcattaactcgtctccttaaatcatactagcgataagtaactatcatctttccaccaaatacagtaaatccatccatccctgtatattgttgtataatctttccctgaattttcactaaaaatttaacattcgctgcctctcctgaaaaagctgtagttttacttgttgaagatgggctatttgtttgcttaaaagatacagtcgctgttgttcctgtttcataactactaatcaaataattgtttattgtggtatattttgattgcgttactctagtacctgtaggacaataaattgtaatactttcaattactgatccttgtggaataatactactgaaatctacattctgtcctatcgaagtgattgcacctgtctgccctgttgaagtagcataatcctttgacaatgtctttgttgatgtactcgtactggcatatactatagcatcccctgttgcaacatctttcatatctaccataaccgtcttcaattcgttgttttcctgcaattgtgctgcctttacagatactccactcatcgaaaaaatcatcataactgacattgcactagctattatctttgtaaaaattttacttttcacacaaaagttcacctttctaatatatcttttctcttatttttccaaccgtgttaattatgcgatacttcataatcaccaaatatgtcattgattcttgtttcatatgcgtaccatcgtgtaaatacagacatattccccaagaaatttttgatgttagaattatctcctgactctgaataataatcttccattaaatcccaaacgttacaaatttcgccttccgatccagttcgtaaggtctgaaatggaacctttaaatcgaatttgttctctccgattgttattttcagatttccattaaatttattgtcttctgtaaaagatgttacctgttccttaaaaaacatcttaaaattctcaggcggtatcgttgattcctttgccagactgctccttccagcctgattcctaaaatccgaattccatatgctgttaaaatcaaaacctccatctaacgtaaggctggaatttgcttctatttcatcacagtcaatcccgtccaattcccatttttccgtcatcttccgagcagattctctcaatgccgcattggtgtcattgcattgatagtaataatctgaattataataagtccaatcactgtgaccatcagaataatatttttcattccacgcttttccttcctgatagttcgcctgacctgccgcccttgcattttctttcgcaaaaacctcatacatctcacttacgatctgtgtattatctgcttcattggttccggatgtctgatgctgtccggtccggtaagtacgcatggaagtacaacatttctcaaaataagaatcaagatcctccctgctcacctttccagcataaaaatcctgcatataatccgaaatttctttctgcattgcatagccaaaagaatctccgaatgtgcttttaggcatacctgtgactacattaaatttttgataacagtcacatacatataccagtggttctgtcattttctcaaaagtgtcttttcgggtttgaagttctttttccaaatcctttactttttctttgtattcatcatatttacttgtatcatttacaatattgtttacattatttgaagcaagcgttccgatgtgaagggtactatcactcatacattatcctctcaaatgagcagcaacaacaagtattgctgctcattccaatcaaacttttattattacatcaattttaaaattctccaaaatcatcaatcgccatattcataataataagaaacactataacttggaataaatgtgtaacttgagctgctcgactgaaaagccacgctccatgttccctttagtttagcgttgcttgatgaatcatttacaaaattaaaatttatacttggatagaagtcagattcatttgcaacccaaaccgacttattaggtgccattaatctccatcttttaattttagacatccctgttccgctaagactaatagttcttacctgtgccgtattaggaatatcatctccacttacactaaatgtccgtgttgacgaatatcctgaacccgtagctgtcacagatgttcctggtatgatctttgtgcttgcagcacacataacaggatttccaacagcagttgctatactacctgttctaagagatactccttccgttggattcgtacaataaactaccaaataatattctgttccaactaccgtagtcagccttgctttttcagcgcagcaccaaccaccactacctgtaaatgaggtcttatgcgtatcgtcatccttagctgaatcatacataactgccaaagtatccacattcaatatcttaaaacgaatatctgtagcactacttaaaatcgtaataacacttgtcgaatttcttttatatttataccaatattcaccaacattaggtacatatgaattattctgtaaatttacttttgattcataatattgatccaataaaactgtattctcaatgccactcatcatcaattcagtatcatttttatcgcctactataatcctataatcgcttgctctatcttcatacgaattaggtgtagcaactactgtgtaattacaaacagtcacatcatcggaaggtttatcaatataaccccaattttttgcctgtctataattcgttcctttattcagaacctgatttccattctcatcgtaaactttaatatttgtgcctacatagccctttctaactaaacatacggcagcagaatccatctgtgaaaagtctattgaaaaatcatatgtagcagaatctttttctgaggtaaaactaccttcaaacgcctgatatgtttctttcgcaggtgcttcaataactttaattgaatatccaaccacgcgagaatactctcctgcactatcttctacctgataatataaatagtatgttcccggatctgtaatctgtacaacaaatcccccattgattgttccaataatataatctactgcacttccatccacataacgggaagctattgtgtccccatcttcatctgtatcattatagaaaaatgcaattcttgtatctgttgtaatctgcccttctgataaagagtcttcgtttactataactggaattaaattagctgttggtgcagttctttccatttcagtatcaaccgaaatactgtcagtaagattttcagccatattatccattgacactgtatcatccaattctatttctcctttttcttcaaaaatagaatctaatgatctaaatccaacacgttcagtatattccatactctgtgtctgtatttgattttcctccgttgttactttgacaggctctaaatcattttcctcaatatctgtgttattgttttcctgctctgccaaccattcatcatacgtcatgttggtaattgtttcttccgcaaatgcagtagttgtagttactgaaaacaacatacatattgctactgcaaatgcaaaaattttcgttactttcttcattatgttacctccttatttttcttttttatcgacaagcatcttacaattcatgtatatgctgcccacagcttttctcaatgaaattaataggatatatatcttttaatctctactcattttttacattaagaaaaggtgtttttcaatactctttgcagaaaatgaccaatttttgcaggaaatgaccatataaacaaaaattaagttcaatagtcatccgagattcccgttttgtaaacgagtttcacattttgaaagcgacctgcaaattttgtacccgactttccacttttgtaatgactttcccgttttttcccttgcttttatgatataatcaccttatggcagagtatttttttgcacaaaaaccggacgtcagttttggcttacaaattttgcaagccataattcacgtcttctgctgttcctatttcagccggcggtctgtgctttattctgtcttctggttactttttgagaagtcttgcggtgaggttgatgtctttggctgcaacctcgtggcatctaagcctctccgccaggtcttctccataataaaagctgaacgcttcatacggactttttccgttcagtttctttctccggtaggaattgatatggttcatcatcagctctacgtctgcctgcgtcagttcatcaaagcttcttcctttcggcaggatcctgcgtataaattcatgtcccacctcgatctctgctttctggtacggcgcacttggattgcagtaatagatcctcgtcctttgaaatccttttccatccggtccgttctctatacacctgggattggaaaactcacttccgttatccgtcaggatgaccggaaacagcttcctaaaatcctgccctcccagccggtggtacagttcatcataaatatctatcactgactttgaggtgttcgcttcccgcaggaaccccagcatcagtgacacatttacaaaatatatcgtcagcaggactttccctcccttgctgccgatcacggaatccatctgcaccactgctgtgtccggatgctgttccatatatacttcgtaatcatgataattccttcccacacggcatccacggtctactttcagctccggttttttatatctcggacggtactttacctttcttggcaggtctatgttcctgatatcaaacaggcatccatccacgtagttgtagagggtcttttcactgcacatcagttcatccttatgtgtcaggtagatctgatggatagactgcccctgttttaccaacggcaccaggatttcattgagtctggcgatttccccttccgtagcaaggatcccgcttcgggattccgatatcttatccgttgcccgcctctgggctcccagagcatcgtaaacagtttttgtcagcgtacacttctttacttcactgcatccgttgcatacatatggcggtttaaagcgatgggtacatatttcttcttcataatgctcgcagtaacggttgcatatgagttcacactgtttacagacagctaccagtggatgcctgcagtcatttgtcccacatacttttttcctcttacatgcttttctgtacttgcaggtattatgcgggtaacttccataaccggtgtcctgttcgatggaatagttcctgatctcctttgtgatggtagtcctgtcccttcccagtttctctccaagctctgtgaaagtcatgtgctcctttagtccgctttctatctccagccggtcctcataatttaagaactttgccatactgtctcctttccccgccagctgctgaagttctgttaaaaaacaggaagaacatttctgctcttcctgcatttgtatcgtcactttcactgctgtaatttattctgtttgtaatcaactttccccctcacacgggaatttcaaaaaactattgaggaaacaaaaattaaccgggcagaaagtaaaaaactctgtctattcttattgtcttaatttgaataccgaaaccatatcactaagtgtagtagcctgagctgtaagttcctcacttgtcgctgatgtttcctgtgccacatccgaattattctgaacaacttcagcaattctttcttcggttgcctctacctgctccatactgtctgcctgttcaatggaaatttcttttattttttcgcactgtctcactcgcctatatacctctgatcttgtaatttcatatttgaatataatcatatcatatttcctcatatacatttatttaagattcagcgtattactattggaatgctcaaaataaaaagatacagaaatgtataattgttgataatatacatctctgcatctttggaattttacaaataatttttttctagcagttatacgctacctttaatgtcattgtaaccgttgatatcggataaatattttcactatatgacacacaaatcattcattgccatattttcttttctgattatcttccatcaaaaagatacacttacttctcctaacggtgctaaataatcaatatacaacattgcgtttgtagaataacttgcatttacataggacaaaccattcatccaatttacctttacttttgtgttataggttcccatcatagaaccttcatctggataataatcaatcatcttctggtttagattagccatattcgcaattgtcttgtacgaataagaattaggtgactgatacatcatatcagcagatttaatatatgtgttaaagtatgatgaacccatatcttggaaagtgactctgtataaagcaaacaaatcttctgttccattacttacagatatagttacaccagaagcttgatatgtttgtgaacttgaagaaccatcccattttacacttccattaaatacaccacctgcactgtatgtctgctgaattggcaaaggatttcccgtaaacatagcataatgatgattgccttcattgcccttattatcccaaaacataatataataatttcccgcagttagtttgcatgtataaactgttttgtcgtaattatcatattttactgctgttctgtaaaagagaagcaaatcttcatatgcgtctgacgatgtatccagtactggatttaattctgcgtcataaatctgaaatgcaacatttttatcaagtaaaacagttacagaatttaatgctttattactgcttactttatggtaatatacatgtgcacctactattgattgttctgttgcccatgtatcattgacatatccttctcttaccgcagaactatactgtgaattgctaggtgcatccaatagttctgttgcggctggataaagtaacccatcattataatatggatatgttgaatatacttctgtatctgttgaccacttctgtgtaaacgtatatggtgttgttccataactccatccatattttgtcgcagttcctttccttgcctgaattgtgtcatctccatctgacacactaattacttcatccgggtcaacaagttcagacatttgaatatcagaaactgactctaatgaaaataaattttcttctgtctcttcactcaatggtaatgtaatctgacttctgtctaccgttgttgatgtttgcaactctgctgccttaacaggacttgaaattgtcattgttaatagcagagttgaaaataatgttgctgcccaaatttttttgtttgtcatctcgtttcctccaaaaaatatttattttgacactcgatcttttatctgaattgtactctctaacatgataaactgtacattcaactcagacataatatctttgtgctgtgtccgtttatatgctaaaatttcccggatatcgcttgcataatcctgataggtcagattttcgcccggattgtttaacaggtcatccagtgtttttggcagaccatgtatcattgcattttccaccgaaaggtctccaagcgatacgctgccgccagttgccttatataaaaatttttccacatccaccgcagcttgtaacagatacttttctttatcggacaatgcctgtatttccgaatccatagaaaaataaatatccatcagatcatccgaatactttgacaaaacatcctctatcttctgtttcattgcattatcattaatgccatcgacacttacctgaccatccgccccaatttttatggaaaacatggaatctgaaatatcaattcccgcttcttgcaaatctgcaaatatcctgtcttttactgtggtattcatttttgcacttgcattcgcactatccagctctgctgcagtacaaaagatatttaaaagtgcattttcctgttccgtcagttctcctcctgccgcttttttttccagtaaattatgaatctgctcatcatccggcactgcctcaccctgcatgatttcttctgcctgttccttatgcaatttctccatctgctccgtataacaggctttatacttctgccggatttccttaattgcacgcatttcctcagtatcggttaagccttcctgcatctgcttcctgactgtccctgcatacttctgaacctctgccatttcctgataagctccatgacttttatccgcttgcgttgtctgaaaagaaagatgatattcggcatctgggtttaccattgaaccgttctttgcctgtacctttacggtataacctctgttgtctgtattccagttcggtatggtaatactaagaccaccatttccattatctttcccaatgccgacctgattgccttcctcatcatacaaaaccatctcataattacagccttccggtatatgatctaaagtgatagtaatatccttattataggtatccttcgcgaaacttaatgcccggtactctgtaatgttgaatttgtaatagtccacatcttgcgtatccgataaacttccctttaaatatccatcaggcttattgataagtgccgtcagatccagcgtccttccaaacacatctttatccgtatattcatttgttttccagaaataatcattggaaactttactattttctactgctatatttttatcagtgggtaaaccttttttcttaaactcataccctacaagctgcgtttgcatttctactgtgcgagtttttaccatctgttcattctccttgcgcataattttctattttagatgtttgcaaaacatcggaaaacacatacattccacattttattattaaaaataaaatatttcctcaatgtttattgtgaagcgttggttacaggaaataaaccgaattacacaaaccacattatcaaacaactgaaaatcttttaggaatcacataatttgtaaaataaatctcaatatagtcattataaaaaaataatttaaaataacaatattcattgcagaaagtgaccaatttttgcagaaaatgaccatataaacaaaaattaaccgagtagaaagtaaaaaacattttcttgcccaaaacagaaaagtggacgattattctttaactgtgtaaaaaacaatcatccactaaaaactctgtctattcttactgtcttaatttgaataccgaaaccataccgctaagtgtagtagcctgagctgtaagttcctcacttgtcgctgatgtttcctgtgccacatccgaattattctgaacaacttcagcaattctttcttcggttgcctctacctgctccatactgtctgcctgttcaatggaaatttcttttattttttcgcactgtctcactcgcctatatacctctgatcttgtaatttcatatttgaatataatcatatcatattttcctcatatacatttatttaagattcagcgtattactattggaatgctcaaaataaaaagatgcagaaatgtataattgttgataatatacatctcttgcatctttaggattttaactttcatgaacagcatattccgcactaatatggaggaatattatcctatttatgtctagtttcatacggcacaccattcatagaataattagaattaacctgcatgatgcaaattctctctatttttcttttttaccgacaagcatctaataatatttcacattttctgccagaaataatactttttgtcccaaaagcaaaaaagacttgctactctgaaaagattttcttatatttattctgctttttccaacataacatttagttcatcacttttccctatcaaatcatcatatctccctaaatctgcaaccactccctccttcagtacaacgatctgatccactttgctcaatatctctttcttatgtgttatcactatcactgttttgtcttttagccgagtatcaagcagtccgtttatctgctgttctgaataagcatctgtgtttgaagtagcttcatcaaatataataatcggcttgtcatgcaccaatgcccttgcaagggctattttctgcttttgcccgccggagagcattgccccattctgtcctaccacatgatctaaggaaacctcttttataaaatcttcaagtccgctgtccttgcaggcagcttctatcaccgtatcatctatttgtttatacagacagatattattccttattgtgtcattgaataaatagatttgttggctcacaacggataccatatttcggtattctggcaatggcagctctgaaatattttctgctcccaacagtatttcaccacttgtcggctcatacattctcgtaagaagattgatgattgtcgtctttcccgaaccattgcgcccaattatagctgtcttgctggattttgcaaataatatatcaatattcttcaaaatgcacttatccctttcatacgcaaaagaaaccttctgcaatctcaaatcatttggacatagatccgttttctttccattatccgtttcttcttccaattccataaacgcataatatctttttgttgacggaataatccctgataacaggtatcctatatttaggattgcagaaatcggtccggtaacataagcactatatgtaatgaaagcgaacacactacctactgaaagtttcatatcaaacactaaatttgcgcccagtatatataacaatgtagaaagaaactgtaccatgatactatctattatcgtattccactgccctaacatattcatctgcttttgtttctctataatattgttctggttaagtacaaactcctcatgctttttatccaagatattaaacagcttgacttctcgtacccctccaacagtatctccaaaccattttgcgtactcctgattcctttttatgaactcgtccataatctgtttttgcttttttgcaaagtatttcattaccacacacttaataggtataaacagaagaaccagtaccgtcattctgaaatctattatgaataaacctattatgccgcctgtcatgctaaacgcctgcgtaattacgaaaaaaacactgctgtcagcaatagatgtcatctggttaatatccgtgttgatattattcaaagtctccgcatagtttgtgttattgaaatagtttacccgcagcttcataagatgtgaaaaagactgttccgaaagaaaatattgtatctttgctgaaatatctacacgtttcttttccttgactatatctatgagggaatttatagtgtagattaccatagacaccaagaccagctctatcaataatttcttatttccgccaataaagccatcgtccatgattcgcctgctgatcagcggaacgcatagatttaacccggtagaaacaagcagacaaccgacaattacaactattgtttttttgtatctgcctagtaacagaagtaatctttttacagcctctttgttatccatcttcttcctccgtcaatattcttacaagacaatttgtaactttctcgacaaaatccttatctatttcacaatcacttattttcaatacaactatatcttcattttgaatttccgctaaatatatattatttatattttcaattcttaccataacatctatatcactaaaaagtggctcaataagactatgttttccttccgatatacaaaataatacaccatcgctttgcatgtaaaacgtttgccaatagatgaactctttaaccgtttttactttactcaggcattgttctggtacatattctaacccatacaaaacatattctggttctaaccctgcggtatatatattatactcacgatcagcaaaatcttttttgaactctgcgagcagaaacgctacatctattttctcacttacttcgaatacaattatgggaatgtctaactcttgttcatttccagtacatctatcaataaattgtactctcttatttggacaccaataaaagcaatcatctaatgtctcctttattttctcacttccaacataaacaacattttttctatattgagtagctagttctaaatctgacaagttatcaataataagtgtatctgcccgatttatttcttcaattcctacaacatcaaaatagtaatcagccttactctttttaatatttgccttaattactgcacagcatatccaatcgggttcaaccttttcagatattgtaatcattgtttcttttttagaaaacctcttatataatttggtaatattttgaaatccctgttccataaaaaacataccaatataagcagttacaaagggagctgcataactgttacatttctgagtaacagatgcaactccatacaatcgcagcgtatgttcagactcaccaagtatatttatcccaagaaacagtctctttaaagaatctgaaaaaaagaggaatgcgttgcaacacctattatatttgaaaaagaagccggatatgattcatatccactattagatgttgcagctacgatgcacattcccttgctcacataatggtttactaatgttcttattaatgacttatccctaaaatgtgtagtgcctaagctcaaattaaccaaataaatacctttttctatacaccaatctaatgctggttttaaatgttctattaagccacttccgtcttcatttagaagtcgaatactgtatatttctgaatttgctaaatatttttgaataatggctgcgcatattgtcccatgagcaaatcttactctactcatgtccgcttcatcataaacacactcttttttttcattaacataaacttttcctgatatttcattacccaaagcagcttcatctacaccattatcaataatcgctatctttattttctgcactaacatcgcctcttatagtaaattcattaaatccattttcttactgccattataaaatttgcctcataagaagctactgcctgacttgttgtgacagtcctatcagacgaactactctccgccgccaatcccgctctaacatcctgagctgataaccttttattttgcacatattcttcataagctgttctttctgcttgtttttcctgaatccgctttttttcctgttgtttctttacttgattttctattctctttttattttctattctacgctcccaaaaactattttttgacttatcattaaaagtcttcccaccatttccattgttataacctgcactccacatttcagcatgacattcttcttttgatgctccataatatattgtagaaaacgctcctccacatataccggaccatttatccggttgtgaccagcccacctgcaaatcatttaatacccatgcttcatactctggatcattcttcatcgcttcaaaccccgcctctgaaattgtaacagatattgactcgcctgcccttgtgggatgcattggaattttagatattttattgtaaatatactgcttgtattcctccattgtcatatctttagcagacacagaacctgtttttaaattgcccactatacttccactaccttcgcgcttttcttttacactatccgcaaaccttgtatcttccttctcctgatctttagtcacaattttctgctggtactgattgtaagcccttgtcatatagttcacattaattgtattgctcatagtaatctccttcctattctgtcaagcccaaatctattgattttactggctttgacgtattttatttaccactaaaacagagccgatagtgatgaatatcgtagtatcttgtaccgaatagcttaaatatgggtatcactttaaaagcatccattctgtttgctttataaaggctattttccctctgctaaactatgatgatgaaccttccgtgtctaaggggatcgtatcccaacttccttcgtcccatctatccatacaccgagtgccagccaagctcctagacggggtcgtgccccatggtgaaaaccgatgccggctacagctcttgtttttatttgattagttaccgacctgccttcgctcataacggtactgattaattcagtggacgcgataccgctttttactcagttggtcttgatatggatgcagttctgtctcaaactccatcatttacgggtttcctatccagaaccctgcccagcctctggtctgccagaagctcggtaaggctctggaaatgtattgctttcttttctatgcagctgcctgcactgtattgccctgtggatatctgatatccctcagcattctctccgggtcatatttcatcccagtgttcagaatcgtataaatgactctgagaatcttgcaggctatcacaacaagtgactgcagctttttcagcggattcatgcttcttgtcgtataatacgcatgcagctgtttgaattcaacggcatgtgccactgctgattttgcagcctgaaacagccagtatcgtagtctcttgcgtcctctgtgactgatttttgtctgtcccttatgcttgccggaactgcaggctacaagccccattccactcagcttctgtatttcctttacatcatcaaatctgctgatatctcccatctccgcaagaattcctgcaaggatgttttcgccaactccgttgatttccaggatattttctgcatgtggtatttccatgcatttctgatgcagtacattttcaatctccgccagttgttcatccaactgtatgatttgttctacaaaccatttgatggattctcttccggcatctgttcctccggtcagccctacgcttttctttgcatagtctacgattactctggctctgctatagcctcgtccacgaagctttgcttcatgccaaaggcttttcagcccttcttcatccaactccacgatatcagatggtatcggagccaccttcagaatctccagtgtaaatgctccatcaatctttccaaaagcgtccatatattccggaaagtaaatcttcatttcacgatggagacggttgatatttctgattctgtcctcggtaagctgatccctaaacatggagagccttctcatgtctgcataaatatcctctgggagataaggcattccatagtttccatcttttacaaggttggcaattattttaggatcttttctgtcatccttgagctggctgttatcttcaatctctttgctctgctttacagcatatggatttacctgaacaacgctgattccatttgaaaccatccatgcagcgattgcaaaccagtagtgacctgttggttcaagacccagtactatctgttttttatcattctttgctgcaagtttcaacacccatgcctttgcactggcaaagccttcggatgaattactgaattcaaaagctcctttgctgagttcttttcctctggtgtcaattgctctgatataatgagtttcactgcctatatcgcatccaacaataagcatctcttcagagatgaaagagagtttgtcattcttctcaaatttgccttttgtttccagctcacgccatgttgaagccttaagttcctgttcaatcacctgtactttctttttaatttcatcctgtgataaaacatttatcactgatttctttgataatggttgtacttttgccttttttgctttaatattcattttagatacctcttgtgtttttagatttcttaccaaccggccaagtcagtaataatctaaatttacttgaggtattctttttggtcaatcccttttactctttaaagtatacaggaagctccttgttaagaattttaaaatatttgaatctcattataacctgtcagtgtctctattaaaaaatctgtcatatcaagataggtattcttgcaatataccctatgaacatattgaatacactgtgcttctatctcctcattcttatgttctaaatactttatcggcaaaactgaattaatcgaaaacctgtctattgaacaattgcataaataaaagcaatctgcatctacattataacgatagtgcaaaagattgttcatttcttcaaaatactcttctttgtattcatctttataaagcgataagattgtaaaatccggatctacggcatttaaaatttcatacgctattattccaaaatttcctggcttttgctttgtaagtggaagtaactcacccggtattccaacaacaattacctctggcttttcattttcttcaatatattttagatattggttgtagcaaattattttttcactttcatttaaaccatttccattcataaatccaggaaaagcatgtatattctcggtattaccaaattgcctactcgaaatcaaactaactttataattttcctttaataacacactaataatctgcatttcaatctcgaatgcattacatcttactccattctctataatcgcaattaccggaacattaatattttgtagacccgaaatatttttctcccatttaaaagattctattggcatttctattaatttaacattacttttttcacatatatcaagaacttctgaatattcatttttatctatttttcttgccaatacaatatttttcccattttttgctgccaaatttatttgttctaatatcaattcaaatttgacaaaatgatatgattcgacaacaagaagtgcttccatctctgccatattatcttcactcatttcacttttaataatatactttttatcattttcatacatctgcatattattaattccaaaacccattggcgatataagaccacatatctcaaaatgccacaacttctcatattctatcaacggtctaacataattatcaaagggaaaaactattactttcatttgattaccacctagttttcaaaattaaaaccatactctcttaatgtacaatattctactaaatgttcttcaacttctttttttgcaacagaacatttctgtagtttttttgatgttgagagatcattatcctcaccaaaatctgctgcacaaatactacaaagatttaatgcccaacaattcttacattccgtttctgtcaactttcctgtatttaataagcgcagtacttttttcgtttcaattccactttttatatctccgatacaataaacctcatttgtttcacttactctttcacaaggataaaattttccttcaactgttacaaataatctgttatatcccgctatacatggaccattagggtggcatattccttttctgcgatatggttttgtcaccctatcatgtattgaacttataagcagtcctttatgagacactattaattttgagatgtatttattatccaactcacctgcataaacaataaaactcttaaaaagctcataattataatttatataaaaagtttcacgcaatgatacttcctgaacagaatctctatcgctaactccagcagctgtaaccactgcatcctttaggaaatcatatgtaaaaaaattactactacacgcaaaatcattttgttcatcaataactgcattaaaactaatcttatccaaatattgaggatataatttttgtatcatctctattttttgtatgataacatcaaatgttccatgactattatctgcaaatactctacttttattttgcactgattccggaccatcaagactaatcattaggtcaaaattatgtttctgtagaaaatcaacaatcttttcattcaataaagttgcattagtagtcatatttattcttaattcttttcctgcaaaaatcttttcgcagtattcagtaattttctttattaaatcaaactctaataagggttctccaccgtatagtccaatacgcaccacatccgctgcccgactatgcaaataataataatcaattgcttcttttgctatttcaaatgtcattcttttattagtatgtacacggtttttataacttccagagtatacgcaatatttacatcttaaattacaattttgagttaactgtaaaattaattgttgcataccttcatcaagatagctttcaataccagaagacgctggatgttcaataataatatcttctttagattgtaaaaagccgttttcatataatttctttaactgctctaattccaaaaaattttccttgttttttaaaatgtcatacattgtttcattaattctgataattgaacatgtatttgcatcataaaaataatattgatttctggttctaaataaatgaataaaaggtttattacttaactccatattgtatctcctttgtttgcaaatgactgacagcaataaaattactgccagtcaccgtaaaacttactactctgaattagccccacatataattagaacctgacaaagcagttgccacaatcttgcccatacttgccgcatatgtattagactgtgttgcagcagatgtgcagttacaaaatgcacttgattggcatacagagatacaatcacatgcaaatgcagtcattgttccttcctgtacatgagctttctttcctaattgctttttcataggacaatcctcctttcttcaatattgacagaaacctgtcatatagtattctcattatgtatgagcaactataccttacatcaaatgtctctttaccgaatttatgatattatcatacacatcaaatctgctatcaattacatctttttcatcaaatttaatatgcagttccttttctaattccatatacaaaacaaacaaatctactgctttaaatcctatttctggattaagtaagctatccgctttctgagtttcagataatctttctgcatgaaattgaaatttattccaaaaaaccgaaattaccctttgctctatatccatattacccataactttcctctatcattcttttcgtatgctaaaatccttttatgctttcgtcttttacatttccgtaagtgtatgtattggcatacgatgatactacattaattcccatactgcattctcctttctatttttgttcgatactttaattataagcaattaacatcatactacaaagtagctttgcagaaaatgaccatttacagcagaaaatgacactcaaaatatagtcaaaagcaaaagcaaaagcataaagttatccttcttaatttaagaactataaataagcaaatttgaaaaattacataaaactacactgccaatttcatgaacgaatcaaaatccttgctgtccattgcacgttggtacagatatcgatactgtttccgttggtcgatgtttgtttcatcactttcattacacaacacaaacgatttaaggtgtctttcttttatgcaaaatcacgaacttgctcatttatagtataaaaaattttgacttatattttaattcacccctccaacatatacttcatatatcatctattaaacgacgcattgtttctatatttttattataaataaccatataaccgaactaaaagtaaaaaacattttcttgcccaaaacagaaaagtggacgattattctttaactgtgtaaaaaacaatcatccactaaaaactctgtctattcttactgtcttaatttgaataccgaaaccataccgctaagtgttgtagcctgagctgtaagttcttcactcgtcgctgatgtttcctgtgccgcagccgaattattctgaacaacttcagcaattctttctgcggttgcctctacctgctccatactgtctgcctgttcaatggaaatttcttttattttttcgcactgtctgcaatcgcctgtatgccatccacaacttctctcaatgaagttgaggctttctctgcatacatatttccatctccaacctcatgaatagccgcctcaataagtgcttttgaatccaccgctgattttgcactctgttctgcaaggtttctgatctgatccgcaacaacagcaaaaccttttccggcttctccggctcttgctgcctcaatcgaagcatttaatgaaagaagatttgtctggcttgcaatatcttcaatctgtgtgataattgctcctatcttctcagaggtttcatttatgcgtgacatagcctgcactaatacttccatatctccacgactgccttctgcaatctccgcatacttataagcttcatcgtaagctgttcccaattcttctgctgttgtttttattccgcttgtaagttcattaatagttgcctgcatttcctcacccgatgccgcctgatccgttgcaccttctgctaaagactgtgctgcttctgcaagatttgtggaacctgtaagaacctgccccgatgcatcatctacccctcttacagttgtagcaatctcctcattcatttttcttatacctgtcagcaaatcggtaaatgctcctgtatatacttcctcacactctgtatcaatcgcaaaattaccatctgacatttcatttaacattctgccagaatctttaatgataactctgattctgtctgacattgcagatacaccagacacccagtgccgataatattcccaaaatgagaataatctttctgaaagattttttcagtcatgcaccaatcttcattttgttaagtttcttaaacatttgtcttgtctccttcctaatggataaaatggttctttgttgtcccatcaatatgtatatatacaagtcaatatatgaccgtacatcaaggtggtttcaatataaaaggcacatttcaattatgcactaacgcataaccaaaatgtgccatatacaatcagatcataccaaaagaaaacagaattatcctgtctgcctgtctgtctgtctgtctgtctgtctgtctgtctgtcgagattatatgtatcagcctgcatatatgcaacccctttctactacaatatatttatggttaatatcccttacagccagtaaggaattatccatcttgttgcttaagctgttagaatgtaggtagcaattggatatcttctcctttcttggacttcgcgtccgtaacacagactgataaccagctcctcattcgcagcgttcgttttatgcaggttgaatcacctcaggtgcattcgtgtcacaccacagtagattgaataggcaatgagtaaaactggtacttatccattgcaataatcttaaggagtgacaaatttatgaacgcagtaggtatcgatgtttcaaaaggtaaaagtatggttgctattatgcggccttttggcgaaattgtttccacaccctttgaaattaaacacacatccagtgacatcaattcgcttgtaaaacttatcaagtctatcgaaggtgagtcccgaattgtaatggagcataccggacgctattacgaagtccttgcccatcaactttccgaagcaaatcttttcgttagtgccattaacccaaagcttatcaaggattttgataacgattcccttcgtaaagtcaaaacagataaagctgactctgttaaaattgcccgatatgcacttgacaagtggcaaaatctgaaacagtatagcgttatggatgaattacgcaatcaactcaaaaccatgaaccgtcagtttggcttttacatgaagcacaagacggctatgaagaataaccttatcggcatccttgaccaaacctatcctggtgttaatacttattttgacagtcctgcacgtagtgacggcagccagaaatgggtcgattttgcatctacatactggcatgtagactgtgtccgtaaaatgtccataaacgcttttattgatcactatgaaaactggtgcaaacgcaagaagtacaacttcagcaagtcaaaagctgaagaaatctatggaaaagcaaaggagcttgttcctgtacttcctaaggatgacattacaaagcttattatcaagcaggcagttgaccaacttaacagtgcttctattactgttgagtcgctacgcactctcatgaacgaaactgcatccaagcttccggagtatcccgttgttatggcaatgaaaggggttggaacgtcactcggtcctcaactgatggctgagattggtgatgtttcccgtttcactcacaagggtgccattactgcttttgccggtgtagaccctggtgttaacgaatccggctcttatgaacagaaaagtgttccaacttcaaaacgaggttcttctgacctcaggaaaacactatttcaggtaatggatgtcttaatcaaaacacatccacaagatgatcctgtgtatcagttcttagacaaaaaacgggctcaaaagaaaccgtattatgtctatatgactgccggtgctaacaagtttctacgcatctactatggacgagtgaaagaatatcttgcatctcttccagaatcttaattatctactatacctttcagaccagcactggtgtggtggtcttgttttgatgtctaattttcaacctgtataaaattttcaaagttctttcattttagccttgactttttatttgcaggctgtgtttttttcgtataaaatttattacttgcaaaattttatacataaccacagtccatctatcttactcaaaggataacttattcctcgataaattactcgccatttcttgcatttttttatattttcgccattttttgcctgctattaaaacaaaacagataaaaaggacgcaggattttactcccacgcccccctaaacttatctggctttatcttccctgacttttatcaaatacagaattctaataaattatttgtactatttcaatttatcctcaacagctttaacaatattatccaaatagtcaaatctatttgcaattatatcctgctctacaaactttattttataatgtttttgcaattcaaagaaaagtacaattaaatccctcggcattaatccatttctaggatcaagaaggctaatcgtttcatctatatgtataccagtactttccaatgcaaattgttttatccacaactttatatcttctctcatgcagttttatccacctccctagaactgctcaaacattgaatatttttttaatcttgcttcaattttattaaaccatctttcatcttttaaatcatcagcattaaaaaaatttttacttttgggcaaagcattcatttgtacatatacatatttcaattcacttgaatacaaagaatttgaaactatagaaaaattagaaacaaaaaagtcatctatgtctacattatatctatatttacaaacatttttcatttccgtctcaaactgatcactatattccccgctcaataaattaagtatacaataatcaacatctaccgcctgatatatttcatatgcccttattccaaatgaaaaaagatgttttttgtttaatggtaatattggttctggtacgccaattataataatatccggtttttctttatcttcgactttttttacaaactcattaaatcttaatatggtttcttcacctgaaaacctattattatacataaaatccggaattgaataaaaccccattatattacttatcttttttgttccgatttgagctactttatatccttttttcagaaacatttctcttaaataaagctgaacatcaaatttagatacattatatccaacccccatgacgctaataattggcacttctatttcctgcttattcttatgtactatactatcaattacaatttcattacctttgcaaatttctatccttttttgagaatgtttgctatataaaatttcatcataaattcctgttgccaaaatgatcctgatatttttttctaaaaaaacttttattgcattatcgtattcttcataacttaccatattgctatctacaattatgactttatcaaaatcaacttcctgcatactcattatatttgccattgaatatatcatagaaatgctactgttatagacttccgatacttttcctcccggtactatatatgatatatcacttttcaacaaattttcgcttactttgctcaaatataaattatctaacgtatacggataaacagcgtacttcatactaagcctcctcaaatttacacccatattttttcaatataatatagtcttttattgttccttctacacctgctcttgtctgttgacaccattttaaccgagcttctgcattaatccttccatcttcctgcgctttagaaatacattggtaacacatcttatagcaccagcactctatacattgtctgcttgtcacatctgctacattaagtattttaatagcattatcaatatttataccttgctgtaaatcgccaatgcataattcttctgatgtttcatctactctctcacaaggaaaaaattttccatctgccgtaacaaaaaaacgttgaattcctggcaggcattgccctccaggacttattatatcttcatacccttctacacctatgtatctttcacacatagcctgtttaattgaagcaatttcgctctcatacaaagtgggtttatattcactaaaaagatcactatcacatgcatacaagaaaactttaaaaacttcataattagaaattgcatttagttccggatcaaaatctaagatttcctttctattaacgggattgataaatgtcccatttacatttaatccttttactgtatcataatttaaaaaaaattcatttgtacaagatacattttgctttaaatctatcactgcattaaaagaaatttttttatcgaaaaaaggatacttctctctaatcaaagctatattttccataattaagtcaaatgtccctttattgctattggcaaatatacgatttttattatgaatatttcgcggaccatccaagctgattgtaatattaaaatcattttgaaccaaaaagtctgcaatatccatattcagtaaagtggcatttgttgtcatattaaagtttacctttttttcaccgaaaacttcctttgcatacgatactgcctttttaatcaattcaatttccaataaaggttctccaccataaaatcctattgatacctcattgcaatttaacgaatgtgctgccaaaaagtctattgtttttaccgctgtttcaaaagacattcttttattcgtatggacacgattaatataacttcctgaataaacacaatattcacatctcaaattacaattttgtgtaacttgcaaaatcacattacccatattatacatatacaggtcttttaaagtatctgtttcataatgttttattgaactaattttctttttttctgttaagaaaccctgttccataagaaaactaatatcttcttcaatgtctgctgtaatttctttttcatcttcttttccccataatgaaaaaaattcatacaattcatatggaatagtaacaactgcatttatattcacatcatataagtaatattttttatgttcaacaaaaatatgtatgttaggttttttaatcttcattattacattcctctcctcgacaagaaagccttgtacgaaaaattaaattcgacaaggctttcccgctgtatacttggcatcagttattcaataataaaataggtcccctgttggtcacgccagttgtattatactgagcgtcattagcgatctgtgtaccgttcgcttccccgatagaatgacagttctggcacttacatacgcagaaacaagtacatgaacaagaagcatatgccataaatgttcctttttcagtctttgttttcttccctaatttcatatggaactcctcctttcttcaaaattatagaaattgatactatgcatatgtatcaaaacctaccttatttttagttgtcgcatctatagcaatcatattttctgtttttttatcttctttttctttatcctctttcattctctccagccatttgtcaatttctgaatccgtaccagtctctccaaaaatgccacaggttgtcatttcggttccattattcgtaaacttaaactccactgatatcagtttactaccatgacttattgccgccttctgtgcatttcgtataacatctggcataattgctaaattttcctcaagccatttcgcagttttttcatctccacatgcctttcgcattacacttccgtcaatcaatacagaagcatttttgcatggagttaaacatttatacttgttagtcaaatactttgaatagtctgatacatttttaaacttattggctgaattcatagtgtatcctgcataataatttgaatttatcgccactgacatattctatccctcctttttttagttattaaaacctttccatagcacatcaggaacattttagcgtctaccgttttaatataacatgaaatctatacttttcaatcagcattgcagaaagtgacctatttttgcagaaaacgaccatccaaataaattaatcctcataaatcaaacctaaagttcaatcaaggtattttttacaaagcaaataaatctattgtttttagtccattctggttatttcttgaaacatcctccagatcataaactgtttcagacaaataaaaaggacgcaggattttactcccacgcccctaaacttatctggctttatcttccctgacttttggcagctccttccctgccgtttcctgctttgcctccgatgtttttcttgcctcaaaagcatctgcattatacttgtactcctgtggttcagctaccatcggtgagtagatgatctctctttctgtatccggtgctttctgatccttatcctttgtgtgctccatacgcttttccttatcaaactgcacattcatagccagattatccagcttatcaatcgaggcatccagctgcagctccattgatacaagcagttttttcactgctttcataggggcaagtaccgcctttgtgaaagggtgtttctgttccttctgcgaataatccacctccggcttatctgcaaaggtatggaacgcattgtttatggtctgaccagcttcacggagtccctttgcaagaagtgctgtccttgcaatatccctgtctgtagatacaatcatatcttttaccgctgttctgacattgagaagtcttttcttgattcctacaaattctgtcaccctgtaaagtgccgctcttcccttttcctttgcttcatcaactatgctttttgctgtagatttgacctgtgctttcacttccaatacctgcgactttatctgctcacatctggtattaagtcgctcctttgcttctgacaatgccttttttgcattattgacaaaagtatcttcctgcatttctttaatctggttctgcatattagtgagttcttccgtcatggaatcaatctttttctccagtccatccacatagctgcatatctcaaatacatcgtttgcctgctctttcatggcatttttctttaataagtcgagaagttctcttatgacctcctcattggtaagtgtttttcctgcttccatatccattctgtttcctccattctgtaaatggggcagccttggccgcccctgtactctgattattgattatcgaaagggtgttgcctctttgtccttctctttatcgggattgccatgatgtttctcggcactctccctcgccttttcgttgctcttatcctttgctttctcatattccgagataatctcattatagagtttttccctgaaatcctttgtgaccggatagcagacatcctgatagattggcttgccctgctcatccacctgctttgtcttataagaaggcattgatacaaagattttctctttaccctgcacgatattgatgttatttacgatgaaactgttttcaaagtaaatacgggcaagtcctttgatgttactgcctttcctctcataaggtgtcacagttacggaaaactctggcatttcctgtgttctgtcctgcttctgtgtctcctctttctccggttccttgattcttgcataggcatcaaggatattggtatagagttcctcacgaaactctgctgtgataggattacatacatccttatagatcacaccattgctttcatcacgctcattagagcggtatctaggcattgatacaaaaagctctcccttgtccttattctcaaggattgcaatattggtaatcttaaatgaatcaccaaatactactgttgcaaatcccttgatgttgctgccctcttttgcccttacttcgtttaccttaattgaatacttcatatgctattcctcgctttctttttgttctttgttttgctccggtatgataaactcacaccaaagctgttctatctgttcacaagacaatctgccatttaaccagttgccaagtgtaacgatcattccgtcctgctcatagtagagccattcctgtgtttcgatgtttccctcatacacgatagtaacatcaaaatcaggcataaataatccttcctccgcatcccacacgcaggatatcccctgtctgagtgtcagattcaggctttcgacatacacagaccagccacttacgactatctgaaattcatcatcaatctccgcaatatcatcctcgatgtcgattagctcttccatttccgatattgcttcttctatatcaccaagtcggtatctcttattcatccatcaccgcctccttataaatgcacctgaccacaaaacgcatagtacccttctgtgaacaggtaaaaagagttaattccttttcctctccttgtgtcttaatgctgttgtcataaggatttaccacctctgtgtctgttacttcatagatatgagtctgtccgtttttgtcgataattgtcacatcatctcctatggaaatctgatttagtggtgtaaaaaatgtgccatatctgctgccattgtgaccgcataacacacagttgccactttctccgattcctgcagtatcttctatatgaccaatcccggcattaagcactttacttgtggttccttccattaccggatacctgatatctaagcccggtatctcaatgatgccgataacaccgccttctttaagaatggcttcatcctctttactaatggaggtttgctcttcctccacatctgtttcttcatcgtaatcatcctccaatgtctgctcaaattcacttatgagctgttctgtctgtttttctccggttgcccgccagaaaaaagggactgccataatggcaatccctgctgtaatcagtagtcctgcgaccacttttcttatgctcatattattcactctcctatcgtgttctgccctctctgtccgcttgataagcacctttatcctctgctacaattgctgcagattccattctgtcatcagcttctctttcttcctccggtccgctcaggtctgcatccacagcctttgcgttctcaaggtcaagctgggcattcagttcacactgccttgacagcttttcttccagttccttgctgtatgcaaatggcttgtcatactctgcctttgatgcttcaaggtcattctggtactgctcaatcttcttttctaagaaatcaatgttctcatggagtccattgaacaggttttccagctttaccatgctgccgaccggacttgtggaaagttctgccttgtactcagtctttccacgaagcaccatataattgataccaaggaagttcttttccacaagcagctcaaatccatggaacttgccgattacagttgtctctccggtcttacatttgctgattgcttcaagcatcatcgttcctccatccacacgctctgtgtaggttgctttgcctatggtaatggaaaattccggattatcaatcagttctttatcccttgcctttacatcttctcttacattggcaagcttttctgttgctgtcttaataagcttcgggtacttaatcataaagttatcctgcaatccatatctctgattgtcataggatgcctttaagagctttaatctctggacatcattgtcaatctccatcttttccttgattaaaggattgcctgtggcaaccgctttaatctctgcataggaaagtgttgcctcatcgatatcctcacagcttcggcttacagccttgcttgtcatgacctgactgatgaatcgctgcttattttcaacaagcgaccagttgtatgcatcaaaagttcctttggtgacatatctatagattgccacctcttcattttcgttgccctgcctgatgcctcgtccttccctctgttcaatggagcttggcttccaaggacagtccacatgatgcattgcaaccagatgtgtctgaacattaacgccagtaccacatttatctgtagaacctataagcacttttttcttacctgttctcatttccttaaatagtgcatccctctgtgcgtcggtctttgcatcatggataaatgctatctcctctgccggaataccatactgtatcagtgtttccttcagataatcgtagatggtaaaatccttatccggtcccggtgtgccgatatccgaaaaaataagctggcagcctatatgaccgttggcatttcctttctcatattctttccatacattctccgctaccttattgagctttccatctggattatttggtgcgtccttatcaatcagccttgcatctgttccgagtaatcttgcctcatgagtaatctttaggaagttgtccacacttggatcaactccaccacctctgatacgctctgccctcacaacaaagtcttccataacctgctttacataccagtcaggctctgactccactatgataggcttgccgccacgaagagccggcacatcaaggtcaagcatgtctgcggtctgcacatctgctacttcacgaaagatattcataagctccggcagattcgtaaacttattgaatctgcttttaaaacggaaaccgcttccctctacagtaagctccagtgctgttgtcacttcaccaaagttcgctgcccaggaatcaaagtgataaatccccatctcttcaagtgccgctttctgtaagtaaagctgcatgacatacatctcacacatggtattggatattggcgtacctgtcgcaaacacaatgcctctgccatcatttatctcagacaaatactggcatttaagctgcatatccgttgacttcttcgctccactgctgctgatacctgacacattattcatcttggaaaaaatcgcaaggttcttaaaattgtgcgcttcgtcaaccatgatagagtccacaccaagttcctcaaaggttataaggtcatccttcctgctctcatctgataaggatttcagctgctcctccagctttttcttctggctttccatctgttttacagtccaacgctccccgttacgctccttcatctcatcaatcgcatagctgatttcatcaatctgctcattgagcattctttcctttctctctgctgagatcgggattttttcaaactgcgagtgcgacatgatgatacagtcatagtcacctgttgcaatccttgatacgaactgcttcctgcggctcttttcaaaatcacgctctgtggcaaccaggatatttgctgacggataaagccttaaaaactctgatgccgtctgaccgataagtggctttggaacaaccatgatcgtcttattggcaagtccgagtctcttctgctccatacaggcagccatcatctcaaaggactttccggcaccaacgcagtgtgccaacagggtgtttcctccaagaaggattcttgccaccgcattcttctgatgtggctttaactcaatcgccggattcattcccggaaactgtaagtgacttccgtcatactcacgcagacggatgttattgaatgtctcgttgtaatactccacatatttctgtcttcgctccggctctgcaaacagccattccttgaacttctccttgatcatgttctgcttttcccttgcaagcattgtctcgttcttattgacttcgtaatgatatttgccatcaccgtcatcaatcctgtcccttactgttacagttttaagattcagcgtatcctcaaaaatagaataagcatccatgcggcttgtaccataagtcttagtagctgccactgaatgcttatccatgctcttattctcgatgaaccattccatgctcatcttatttaagtgtacctgaatgcctgtattgtaaaactggcttctgactgcccttgctcttcttggtgtattgagaagctcatagataaactgctcataatcaagcgactcaatccatgtcgtaccaatctttacatcaatatccgaggcttcaatccattccggctgcaccttttcaagtgctgccacatttcctgcaaatctttctgcctgcggattgtctgtatcagccgccatagcctttgctacacgaagtttgtctctcacatttcccgaaagatactcgtctgctgtctcccagccgatgtcgggattgttctcgttgtagcggtctggatttaggaaaaccagtccgtccagctcttccacaaggactgcccttctaatctctgctaatgcatcatcacttagcgttatctcatccactgtctgtccggacttttctgcaagttcttcctttgcatttgtaatatccggctcatagatagaaagcatataggcagggtttacatatccaaattcattgacggatacatttaatgcttccacagcagtctcaaccctgtctatgacagtctttgccttaatcgtctgcttataaaacatatccgcttttttcacctccccatcttcgtttacttcctcaagactgcaaagaagtggataatcgctgtcatccctgaatgctattctgtttgcttttgaagtaatggctccatactgctttacgaaggcatcatattttacattaagaagtctctgcttatcagaaagctcctcctcgctgcagccatccatctggatatcaatcagctctcttgttatctgtctgatttcatcaaggcttcggattcgctcctcggcagtctgtgatacttctttttttaccatctcggaattttccctgtaatagagttttccttcaaaaaatgtgtaagtgtagtttctcacatccggatcagccgggataacttcctccgtctgctccgcctcatctgccactctctcaaaatctgtcatctgggctttgatattaccgatagccttattgagagtctcatacatattgaagttctcatcattattcacacagactgtatatctgctgtcctgtccgtaaatccttgtgtcatattccatagatccaagcatcatctccggatgctctgcaaaataagagttgactgcaatgccattctcagttacaccaaggtgtacccagtcaggttcaatatcaatctttctctccctcttctgcaaaaacaggatatctgctgtcacttcggttcctgcattatctttaaatgcagtattcggaagtcttactgctcccacaagctctgctctttcagccagatactttcggatagtaggatttgccttatcaagtgttccctttgtggtgattactgcaaccatgcctcccggtcttacctgatcaagtgcttttgccagaaaataatcgtggatacggaagttatacttgttgtactttggatcaaataccttataatcaccaaatggcacatttccgacaaccacatcaaagaagttatccggatatgtggtattctcaaatcctgtgatactgatattggcattctgataaagctgctttgcaattcttcctgaaatgctgtcaatctccaccccatacagcttgcttctctgcattggtgccggcatacttccaaagaagttaccgatacccatagatggctctaatacattgccgcctctgaaaccaaactggacaagtgccgaatttatgcacatggcaatctccggtgaagtataaaaggcgttatttactgttgcccttgcagcactgtattcctcatcagataaaaggtctttcagctctgcatattctttgctccagcctgcgttattctcatcaaatgcctgtgacagtccgccccatccgacaaacttcgacagagttttctgttcctcaggtgtggcaagcctgttctctgattcaatctgctttaaagtgcggattgcatccatattccactggtatctggtcttagctccgcctttttccatttcccagaggttgtagtggaagttgtgctttttctgtactgcatcatctgaaactacatgtccattctcatcaatcttggtatcccagccattcgctattgctctttccctggtttcaagacgattggcttttacactatcctcgatatcaaagaatctcttatagaccggattcatcttatccctgtcagccttctgctttgtctcctgataataccttttctggtcttctccgcagtaaaatggctgttttaccatataagataagatttcatataactcacgccagtcgagtgcaccttccttacgcacaccattcctgttcttatagctgatcttcacatatccgcttctgattgagtactccacaagaccatacttattgttggaatatgcctttctttccgcattgtctgtacctaatgctatatccctgataaggtcaagtttattgggcataaatgcaaaatcagactgcaccacatccataaggaatgccctaaatggagtgtagcagctacaatctgtcaccagaatctccgccgcatcacgcaggtcttcatcaagctctgcaatacgcttggcataatcaatcggtgtaatatactgaagctctgacggatctttttctgatgtttcagcttctatctctgcaccatattctgcctgtgttaccatgcggtcttcatcgggagtttcctgtagtgtcatgccttttgcacttacataatctctgttagaagcatagctctccggctcatccggtattgcataatcatcaatctctgattctgcctcctccggttccacttcccggtattcggcatcaatgacctcatcatcctcacggagtccgtccatcgcaagctcatcaatacgaggtgtctcagactggtattcccctgtaagaataaggacaccaagctctttttcgatatctttccacgaaacatatccttcaacctctccatcctcatctcgccactgaaaacgcagtccattcccatgaaatgtgtcatatccgtgcagccccagtccgtcaaccggccagcctgcacctccctgaccatactctgctttgatacgctttgccctggttcctgcatcaatctctgtttcaaaaatcttgcataccctgcccttgccaccgacaaagcctgtacctctcataagcacctgtttgatatactcacctggtactgttgcagactttttgggattcagataattgtatttacctgctaatgcagcttttctgtcctgctcgaactgacgcataaactgattattgttttcgtcctcagtatgaatggtgccaatgcttgcctgcccgttctggtcgaaaaaaaaggaagcctgtgtatattcggcttccttactgacacccaatgaattgatttcatcaagttccctattcagttctgtatcatctgattctagtggaatcgcatcactatctgattcagtaccacttcctctgcctgcatcttcgcctgctctcttatcttccacatctccattgtcgatgacggattctgtggcttgtgcttcgccagatactgcatctccagctggtcgtacagctgattcgcttcctcctctaccgctgacatcttctcgtacatcttcccgaatctcatcagcgtcttgtatcttgccggctcgttctcctttagatagttcatcgccatccttccgtatttgcccagcttcgtgagatcctccgtctcgtccggcatctctatctgcggataaagcagtccgtccacttccttgtaagtcatttcttctaacatatccaattctcctttcgctctcgattgcctttaagttacgactaaattctctaagaacactacaggagacatcgcatacaatggaaccaagacggtaaatgatctcttcgtctttgatatttacgatctgactaaaatcctgttcttgcacagataagtcaaatccgcatctcgtccctacagcatacatgacacttgcatatacaagctgctccatgtccattacctgctgtaagccattgcgtttcttactttcttcctttatcacactacctgatagctgcataagctcggtcattcggtttccgaactcttcttttattataaaccaaacatctgttcctgtaaactgttttaatatattttttagagactccctgtcgctgttatcgtactgctcaatctgaccttctgacacaagaaaatccagataatccttaagattttctccctcaaggtcccatgtcagtttgacattcttccctccggtatcactgatatcaaagatatacctcatgcgtggattcagcgccctcgacgggaagatggcgcagcctttcgcaccacgctttacatatcttcccacctttttccaggtatcataatctgccatgagtgtgcttttttccggaggtctctgagctgttaccataacgatattgtcaaattcatagcggtataactgacctgcgacctttaacacatccttccagttcttttctgatctggtgatgttaccaatttcagaatcgtatatcgctttgaccttcatatcaacgcccatacctttgtcctcctctacttaaacatctctgcaaacaatcctttaaatagctttaactcatccttatccagctcgattgcaaattcattgtcgattgcctgtttttcgcatttatcctttttctttgcaatcttacgcaccacacgaagaagcacatagcactccttggactttgcaatgctctgtttaaaggtcagctcatcctcatcgactgacttctgcgtctgatagataatctcttttaacttatcattgataccatctacttcctcaagggaaataataacggatgccttagaagcacccgatctgtcccactccttatgaagttcctttactaaaaactccatgttcttaattactgttgttgaatcacttttcatcttgctcttcctccgttttcttttaatgaagaagggagctgaccttcgctgataggcgtaaaatcaactcccttcatgtcctctgctccaaggactatctgctctgcataatacatatccattgccttattgatggcatcatcaagcgactctgcctttactctctgtactcttgagagcacttcttttatctcaacatcaaattcctgttccatatgatatcgcctcctgtaaaaatctcatcaccggcacttttcttcctttacctgtctttccttaaagccctcatcgtactttccatcttccagcctgtcgtaaaaacagtcctcttcaatcgttccgaaatcctcatacatctggtgaaggaaatcattctgcagtttctttggcacatcatcatcctttgacatatcctgataaaaatagaacttctgctttagctttgccctgtaatcatagatatcctctatcttttccggtgtgccatactccctcttgtatgccttgaaattcgtggttgagagtgtggaaccgagataaattccatgctcccacgatactccgattgtggtattgtcctttgtaggcttctcatccttcggataacgcttatactctgtcgcaccaagggcgattgtaagggaacctgacttcatatccatcaccacgagattccttggtgataatgcttcaagcaccatgtaatcatggtcattgaagttatggaatgtctgtcccctttcaaataatctgtccacactttcataatgcaggttaaaatcatccacccagcccttatcggtcattccaatctccttgagctttgcaacacattcagaagaactggcttctttatcaaaccgaaattctttggaatcgttataaaatccctgaagaaattgtcccagctgaatatcatccaggcagaatctcgcagataccgttacatttgctgccctgtaatactctgtgaagttatctgctttaccaagcgtccttccaagctgcaacaaattgtctgcaagctctgacatgtcatcaactgctataaaactcttataatcatccagagtcatcagcatatttgtctctgttcccctgtcgttttctgttaccagtatcatatcttttaaatccattcttacctccagtctcagagagggactatgccctctctgcaaatttcctgttatggtcttcctatcacaacaatctttcctgtgcttgccacatcccggtaaacaacaccaagactttcattaagcgcctctaccaccttgccatttccgacgtatactgccacatggctgatgttcttatatcttccgttgcttgtaaaactgtagaaaataaggtctcccggctgtaactcatcaaaggcgactgtctttccggcttcatccagtccctgtgcctccgctgccgctgtggttgcaccgccgtaactaatatccacgcctgcatctttccatgaataataggctaaggaactacagtcataatagttaccgctgtctcttaaatcctgactataaggaaagccaactctgtgaagtgcataggagcagactgttttctgcctgctgtctgtaatttcgtttaggatggcattgatttcatcctcagtcatggagcttactcccggacttccgcctccgccgccacttccgcttccggcatatccaagctgtcccataaactccggactcatgatctgctcaagcatttccacatgatcagagttaaacccatagaccgaaatcatatccctgtacgatttcagtgtgacattcacatacagaacagacttcgtgacagtagtcacattgccgtctgcatccgtttcttccacatcctttgttccggtgcttgtggtgtatgaacacatatcatttacaactgcctgcagccagcctttagaagtatcattcatgactgttgcagtatctccgacaccatgcttgaccatatagactgccatgatgtcatagtaattgcttgggttttcttccataccttcatagtccacatatacaagctctccaagatcatatccggtatgctcattcactttcgtgttcacatcccggttaaactcctgcacataagcactcgttactgtctgcacggtatctcctgattcaagtggtggcagaaataaagcaaatggtgaattgtaaaggattgctatcaccgctataaccggaaccgcaatcatggcaactacaagaacaagtaataaaagcaccaatccaacaatcggtgccgctgcctttacccaggtaatcgcttttcgcacaatcagatcctttaccagctttgccacgctgtctgtctgattctcctgtgctttcatcttatccagaaagaattttatcttcctgctccggttggtcattttttcatccttgacctctatggacacacctgccgcatatccggctgccatgccgattgccgtgcctactcccggtgcaaccgctgttcctgccgctgtagcagctgcctttgtggcagttttcgttgcaaccttggcagtagtcttggctgtttcttttgccgtctctttagctacagtcttggcagtatctttggcagctttctttgctgtcctttttgccagcttctttcctgcctctaccttcttgatacgcttctttgcctcgactgccgcctttttcctgaaaagtgctgcacccttggaagcagttccggtaacaggtcggcttgattcatatgcaagatatgctgcctgcgatacctcctgcccgccctccacctgctccgttactgccccagctgcaagtgctcctgttcttcctgcaatgtgaagattggtattcttggtcttgattgaagttcctgactctctgatgttacgcttaaacttagaaagacctttatccttagcctccgactgatgaatggtactctttctataagtactctttccaccagcacttttctgaagcattaattttgcagatgcttttttatccatttcattggctttagcatcatgcactttcggacctctctctactgtatagatgttgctgcctttaatcttggcaccctttggctcgtgggcatgaatcttggctttctccttggtgtgaatgaccataggtttgtcatcaaccttttttatcttcaatgttctcaccttctttctacatccattacccaaaaatgggtaaaaaaatagccatctggatgattagtccaaatggcttatgtaaaaatctatttaattctattgtaaagaactgtctctattctggttgataaatcaatctttttcttataaagaagtgtccacgatgcttgattttttgaataatccatcttttcctctggaaaaaatgaacgacagaaataattatctccttcatcattagataaaaacaaaaatagattcctgctctccacgttgttttccataagataatcagcctcaatcattgaatacatatttgctttcttattatacttaaacacagtatcattactatcaatcatttgttcaagcaatggcaggaaatgaactctttgctctatcttattataaaaatctgatgactctattttttcaattgtaattgttccatctgctatctcatcaaatactctgcctctgtctcggctcaattcaggtctgtctaccagatattgtaatcccataagatgaaaacaatcttttttatcaaatgaaattcttaatgtaactgaaacaccttttctccctagtacaagctcatattcggttgataatagcggaataaatgcatttatgcaatctaaaacattcctcattacagttctccactacatccttagattaagaaaggctctgcataagcagagcccttctaacattttctttcgaggattaacctctagccagattgtggtaaatgtcaaacccttataaagctcataaggcactgctctctggcacaacaccttactttgccgcttggcagacactcaagttgcctgtctttaatattatattacctgtcatatgaaaatatgtcaatccaaaattcatgacttcataaagaattaacatttttcatttgcatgctttttcatctcaattatctcgtgaatgttggtattgtacagcctgtacaaatctgtatccttactaatctgattatcaaacggaatcaccaccgagccacacttgataagtcccattcccgatgcagtattggttacgaatcttagctgtgcctctgataccccgataacttccgccatcttggaactgtctgtattcgcctgttttaagagtgccacaaactcagagtttgcaagcattgtggttgctgtatagttctgcaacagatcgacgacattctgcgtgataccggtacaaagtcctccctgctttcttactttcttccagagctgctgcagatattttgcagaatactcggaattaagcaggacgtgaaactcatcaatatagagccatgttgccttgcctctcttgccattctcaacaatcctgttctgaatagactccatcatgacaagcattgtgataggactaagctctgtacctaagtccctgataccatatactgtgaatctgttatccacatccacatttgtctggtgattgaagatgttaagtgaaccatttacaaaaagctccaaagacaatgcaatgtcctttgcctcatcctccggctgtgccataaggatatcgtaaaaatcactcatcaccgggatatacttctctttgctccttgcaatgtcgatatacagctttctcacacaacgatcaatgattgacttctgccttgaatttaagctgtccccgatacactgctcacaaagtccaagcataaactcgcccttttctcttaccattcccttggaatcattcggatcaaggctccatacatccatctccagcggattcacatagttatccgtgtaggtagacatatttactacagttccgccataagtctcggcaatatcaaagtactcgttcattggatctatgacgattatttcatcatctcccgacaagaatacgctgcccatttccatcttgcagaagaaggatttaccggaacccggcactccgaaaacgaatccatttccgtttatcagcttctttctattgccgatattcacattcttgctgatctggttgataccatagtaattgcccgtgctatcattaagctcctgcacattaaatggcataagtacagcaagtgactgggtaagaagggtacgcattgtctccacctgtcttacaccaatcggaagtgctgtgttgagagcttccctctgctttaagtagtgtgtatcaatcgtgcagctgttacgctttccgatagtctccacagtctcacatacactctcaagctccttcttgctttctgccataagaataatagttactcccacgaagaaaaggcactggtcattctcacggacatcatccatgatttcctcaatctcctttttctccgttctcttggcatatgagatttccgtagagaagtcattattcttattacggactctctgctgcttaatgatatccgactcaataccaaggtatttcttctgaagcacctttgttgtcagatccttgggaacaggcaccacatcaatgctcgtgatggaatgaaccggaagggaagtaatctcattgatgaatctgtctgacaaactgctcggatactttttgataaaaagcgccttgcagaatttactctcatcctcaaaatggtccgggaaatatttcaccataccattgcacagatcatttctaaaatctgccccgaccttctttgcctttttgatatcaaaatcaaaactgccctcatctccaagatgataatagtcatagagcactttcagtctctcattgccattaagcggcacgatctctgccccaagctcaatgaaagccttgtgtatcgttgcctcaagggttgcaaactgtgccttcgcctcctcgaagttctttctctcaatcgtgattgtcaggtatctctcctgctcaatcccctgtctgccctcaataatcttctcctcaatgatgtcattgtagatacttctataattattgaagccatcgtttttctcagcaatcagaaccttgtcacggagttcatccatgtttttgttcttattgttgatcgtaatcttataattacagtccagcgaatttaagaacttacagtatctctcgaaaataccgatctgctcatcctcggttgctgtcgtgtaattgatgtcctgaaagcggtagcatttggaatacttatttttgcttacttcaaaaatgccgttttcagccaccgccataatctctatggtttcctgaatggatttaggtgtcttatacaaaggctcactcgccttctttaataacttaaatccgtctgtaaataaacccatgtctctaacctcgctttcttataatgaaagcccgccgggaacttcaccctgcgggctgtgttcccgaccttgcggtcagatactattcgtttctaatgcattgccttatatgctgcaatgcctgctactgccgccacaatgactgcgacaagtccaagcagcatgtttctcgtctttttcttcatcgcttcaaactcctcctgcttctttacagccgaatcagctgttacagtctccggttcagcctttctgcctttcttctttacctgttcattctgttctgcttctaactgctttattgcaggctctccttctgttgatacataggtaagcgccctgttgccaaacataaaatgcagtttctttcccatatactcgtagaaattcatcccattaaaggaatagaaaccaccaagtgcaatcggtgccacacaggggattgccacataagcagaacccgtaagaccgatatacttgtaaagaagaaggacgataccgccaccaaccactacgcttgcaatggaaaatataagctgccttgcagtaagtcccattgcaaccgattcctgatagcggtcaatatccttgtttacttcgattaccattgtcgcttcctcctatcttgataaatcctttttctccggctttcttgtcattccaatattcgcctcatacttatccattccatccggacacagttccctaagcttgtctacattgaacagataaagaggatattcacagaacccgctcctttgcgtgaatccagtaaactctccaaggtcgttatctgtaataaacttttcaatatccggcatgtcattcacattcagatatccgcagtaatttggtgctgcaaccgacaaattcacagtcacatccccaaaaggctcctcatatccatcttcattacacataagaccgataaacattgccatgttattcatatactgctggatatcaaatgtcacctgcgtttctccggttatgcttgaattataagtaacctgtttcttttcattatccatttctgcctccttctataatccaaatgccttgcttgtaagtgtctgtgcacccttcacacttccaacagtcattgctatcgtaaatgtcatttcacacaaataaataagcgtctgtgcccagtcagcataacttcctgtaaatgccggaagccctgcattgataaatgcattacataccacaatcgcaagtgccatcgttactgcctcaaacacacacgaaagaaaatatttgcagtaggtagccattgtatgactgaccattctgtttcctgccatcgtggagcaggcaatcgcaccgagcggcacaataatcagtatctttaagaacctgaaatacactgtgtaaatgatgaaaaatccacagataataatgatgattgcaagcaaagctgtaagtatcagcattactagactttcaccaaatccaagttccttaatgatatctgcctgtgtactgtcaatagcaagctgtgtcgttgtcccggcagatataagtcctaccagatttcctatggaagtaaaaaacgctttcatgatcgtgacattatttgcaacaaaccattctgcaagtcccagtcggataagcatacgaaatatagactcaaacctcatctcatcttttacatctatgctttccgagcagaaaccgataacaaagaacagcacaacgagggatgaaccgaccgctacaaagaccggctcaataccctcaataactgcccagggacctccgcccttgaaactgaccggtgactgtccaagcattgcaaagaccagggatatctgattgttccaaaacccaaacaccgcctcaagaagtgcaaggatcttgtctccaagcttaaaaatatccatacttgttattcacctctttccttttactaaaaggggaactttttcccccatcttagaatcctaagaatgtcagtactgttgaaataccagccatcatgacacctgctacaattcctttcagtgcagagttcatggtagatgaatcctgctgctggtaggcttgtgcgaactccataacattctttgcaagaatgatgacaccaaccgcaccaatgacagcaataataagtgtctttaagttctcaagtggctgtgttactgcggaagtacctgtacctgctgcaaaacaggtagtgctcataagcatcactcccataagtgctccggatactgccggaaccattcttttcttaaaatgaagtaatcttctcttcatgccttttccctccaaacccttgttttctgcgctattgcagactgaattgttagttactgtaatctgttcttttctcatgataaaaatctcctttttcttgatgtgtgacagatatggaaaaagccagaaaggaatgtacacattccaatccggctgatttccgaatggaatatatacattcctctctgtctttgtttttttactatatgattatcaggcaatgcctgtagtaatgattaatcgggctttccccgatgcgttgtgcttcaaccacctccttttatggcatgaaaaaagcaccttaacctgttattggctaaagtgctgtgcaatctataataaaattggatagaaatattataagctaacaaacgccaaccgattctatccgaagtctctcttagcaaattgttagttaaattggtgcgatatatacttttacctgtaacctgtcagaactaagtgcctctaaatctgaaattagtccatacggattacttagaaaacttcctttgtcataaataaagcatacaagagttttacatttatctccataacgagctatatcaatagctaattgttcacctacttccttatctcgtaatccttctctagtcatctttgtttcaatatatgtttcatacttaggtaaataaaaatctattcttgagtttcctcctgcataacttggcacataatcctctggacgaatatcatcaataaaaagacgtaatattccttgcagtaaatcttggacatcatactcgtcattgatttctaatgtcgcacgttttgagtgacgatttaaaatagaccttgcacatttatgaaaattagtacatatttttttaagtgttatatcaataggttcagttagtactatcggcggtatatcagcaaatgccttgagaataccaattaatcgttcaagcacttttacatcatttccattcgcttttcttgctatttcacaaaactctattgtttgtggatcatcaggaaattgctgacgcagtaatctttcgcagtaagttaaccaatctgcatatacatcacctcgcactatggtttgaatatttgtttgtgcacatgtagttttaatctttataccttcttcaattaactcttgtattgttttcatatgataacatccttttcataaaatacttgtatatcgcatatctacagtatagcataacttccatgcctatgcgataatttactgcttcattcgataagaactcatcttctcagcagttacctccggataaaagtaagtcagtatcgttgctttcggaacacctgccgcaagtgccatcttgagctcttctttctgttcaggtgtatatgaccagtgaagcatacgatttgtaatggtatcttcccacttaggcttttccctctcaggatttcttacaggcttagcaccagcacttccactagaagcattggcactttctgttgcttccgacttctgcgattcatcgacatactcaagctcatttgcctgttccctgtcaatctttgctttctgctctgcttcatcctgcatggagaatcttctgcttaattccgcatcaccaagcatcataaactgctcataggtaagagaatctatatacacattctcgcccttatccctcagcttttcataatacttaaccgccttgtctgaaagaatctcaaatggcggaccgataagattatctgctcctcttatctgatgaacataaggctctcccttgccatctgctgtctggttaaacatcggatgattgaatggtatgaacttattgtccatgataggatcaaatccacggataaagataatacactttttgttatccagctttctgacttcatcgggtgtaaacagttccctgcctaatacatcataattcctcgaagagcttccctgtctgccctttgtctcaccgcttgacttcttatcaatcgtaccttttccaagcagctctgagacgtacttatgcgttgactgctcgttgccgccaaggtagatgaaagtatcgcagttgcctggaattgtctcccaggtgtccttaaaaagtgcctttaactgggcaaagttctgtattatgataatacttgaaatctccctgcttcgcattgtcgataacaatgaacagaagtcatccggcaatgcgacattcgcaaattcgtctaacataaaggtcacatgaattggaagtctgccgccacagttaaagtccgcctgatagtacagttcctgaaatatctgcgtataaagtagtccaataataaagttataggatttatcactatccgggattacacaaaacagtgctgtctttgtctctccatccccattcactccaataccgatatctgacagattaagctcatcttttgagagtaatcgtaaaacctgcttattctcaagaaatgcaagtcttgagttggcactgatgataatggaacggacggtatctcctgcacctctcatacatttgttgtactgctttactgccggatgattagctccaagcggagaactttcctctaaaaacttcatacgcacatcgagctttgatgccttcccctgctctgtaacctctgcctctccaagaagtttaagtactgtctcaaagtttctctttgccggctgtacctccagccacacataataaaagatagactgcaagaacaatccttccgctttttcccagaacggatcacttggtgtcgctccctttggtgtcgtattgctgataaggtttgtaatcagcttgaccacatctgtttcctctctgatataggaaaatggattgtaacagtctgatttatccatctctaacagattaatgactttcaagttgtatccgttattttttaacatctgcccgcagcttctaaggatttctccctttggatctgtacagataaaggaacagttatgcggcatctgcataagattcggctttacttcataaaatgtttttcctgctccggaaccaccacagataagtatatttccattgagcttgagtctcctaaaatccagcgacatcttcacattttggctgagtatccggttgaaattctcatccttatctgcaagtatcttgttgacctgcttcggattttcaaatcttgccgtaccaaattccttaccgggcatatagtttctctgactggtgtaatacatgacaatagccatcgcatagatacctaatgcaatggctactgcttttactgtattggaattgtaatagttggcaaagggaacagcacatacttcattgaatctgtccataaattcattaaaggcaatcccttccgtccacgcaccatttatcagataaccaagataccctgctaacactgcacccacaagaatgaatatcagtgacggctttttctttgttgtctgcataggctgctacctcgctttctttgtggtaacagttttcttctgtgtggtctttttctgctgcttctgcactttctcgtaacgctccctgacagatgactccaccttgtcgtagtgagtataaagctcggttcctttctgggttgtcaccacacgattctgctcatcgtagagcttataatccttggttgaatcaaggaaggtaagcattgtctttccaccatgaatctccatgatgttttccttacggagccatacatatcttgcctcttctccccatgtgccgggaactctggtcttaacagcatggtcattctcttctataatcagcttcttgctgattgtcacatctgacaggttcgcattttttgatgctgcaactgccctcattctctcagcaaggtcctgatagcctctgacacggttgataaatgcatccttgtccatcatgactgtatgggtgccatcctcatttttctttccaagcacaccgattgtctctagctgtttgataacactttcagcctgctcaccattgatactgaaattctccttgacctgatccacactgatagctttcttttccattgcaaacattccgaccttttcgatcagtccgtcaatagcggtattaaccctatccccttctatcgtgtggcttttctcgtttccctgctgtttcttcaaaaaatccatcagcttgccaagggatttttcatctccattcttcagataatcgtcaaatgtagcaatcttaccaaacttgagcttctgtatcatcatattcacacggggaactgcctctgtatgaaagattacctcactcagtccatctttcctgttacagtctggaagtaccgaatacaggattccatacttctttgccatcttttcaacctttttcatatcttcggtattaaactgcaacacctgtaaatcgccaccttttaagatcagctttctcatggatgtcttgccaagtgacttttcataatcaagcatcccttttaagaaatctattgccttctgcatggcagcaatgccgccgcttcctaccttcatggcaatctcaatgccatcataagctacacggatgatctgcaccgcttcctgaatctcttctgccattatcgcacctccactttctctctgactgttgttttaagcgtttctgtctctgtagtacggatttcctcggctgatacatcaataccataagcagtcaaaatatctgccagatgattgattgctttctcctcctcgatacgatacatttcaagtgccacaagcaggttttccacctgttccacccatgcaggcttcatatcatatttagacctgtatgtgaccataatctcgtccgactcagccttatccgctgaatgtgccaaagcttcaataagagaaatcgtgtcttccttgctgccgcttctgaatgcgaactggacaacaaagtttttctcttcctctgtaaactgatgctccacaccattcatctctgttactgcttcatttactactgctaaattcataagttcctcctaatctgccatgctgttttcaagcacagcaatctcaatgatttccttcatcttttccgctgaaatgttgttgtttataagctctacaagctgtgactcagtaagtcccttttctattgcactcttaatctgcacaagctgcgccggaacaaggtctcccgatgcaaccagctttacaatgtctgcccttgactttttcttaaatgacagtcttgcaaaaaggcttgccactcctctgttactgctctttctcacacttcgctcaatcggaagtctctgcaccacatttccagtaccatcaactaccggaatctgataatagaccggaatcccgtttgccacagcctgcatattctgaggaactgcaactgtatcaaccatctttttatctgcctgtgatacggactggctttcctgcggctctgccttactttctgcctcgttcttattctctgtggcaacacttatgatcttatcttccaatgactctattctgtctcccatacgcttcatctccttatcctttttctcaatatcatccctgagccttgcaatcgtactgcttgccttattcagttcattctgctgactgttgataagagcatccttatcctggttctccttgaccagacgctccctgacttcctcatcatctttggaagtttctatttcagaaagcttcttattcagggcatcatacctttcattctgatgattgatctttgcaaccacttcatccatctgagctacaagacttttcacatactctaaatcctgtggcatctgctctttggctttattaagcttatctaataccacatcaaacatcctgcgcatgtttactgctgtatcatctttttggactacctctctgattgcatcaatcggcacacctttttcatagtaatccaatgctgtctgcatcttaggtgctgccatcctgctatctttcagcagcgttaacaactcttctgatacacccttatgcagacattttgataacaccttcatctgctcaatgtcataacttttgttaagatacagaccgatttcatcatcagtcagtccatattcataatcgcttttgacaagagcaataacctcactgtccatatgcttattacgaagaatctgtatctttctctcaatcgccatttcacttaatggctctcttttttcttccatatatgcctcctaaccactaaaaaacagcctaacgtatcggctgttcttttctgtctcttattgtttctttgtcatactgcttctcttctgccgaagctgatacagtaagttccttccatattgatcttccaaggctaagttcctttgataccgcccgttctgccttacagtcctgtgcatacttgctctcatatttctttctaagactctcgacctcttccacactgtatccctgtgctaaaagttcagtgttaagcctttcccatgcattgtgctcatcttcaaagaaggtatccccactctgataacacgattccgcatcatcaagctcccggatctgttcagccttgtcaaaaatatctttgaatctttccttagccttataggtcttactcttttcctttgatgcttctttcttcttatccgtcagattatcaagtaccgaaacaagttcttccgcactctcaatcttatgccttaccagaaatagatactgctcctgcagcttatgcatctttcggatatcatccttatacttccatacctgactatatggcttctttttcagctttccaatccggtaaagctttgcataatatcttttctgcaagcctgacatcttcgccctgcggtatcttttgacatagcactttactatcgctgcctgcctttcctcattctgtgactggtaaaaggataaatcttccttagcaatacgctccacaatagcttcctgtgaataattctcgccaagagtcttacatcttctgaatcttgtcatcccctgtggtctgactgccagatactttccctgcttgacctcatatcctttttccgacagcagctccaaaaatccactgaaatcatttgcctgtaaaatgcaggcatcaagatctctttttatcatatctgcccacacaaagctgccttcacgatattcgctccaatccttataattctcgtgctgtttctctttgctgccatcctccacatctataatggaaagaccatactcctgacacagcttattggtaatcggctggatatactttgcccagtcacctttctcgtagcgatactttttcccatccacaaagcttacactgttaaatacaatgtgtgaatgaacatggtctgtattatcatgaaccacaaatactgcttcataggcatcgccaagatattctgctacaaacttctgtgttatctcaaaagccctgtctggttccacctcatcctctttgaaagaaagaatgatatgatacccctgtcgcttgtctgtttttccaaactgcttctttgtatccatcatctgttcaaaagccatatctgcctggcagtttatggctcccacaagtcttcctccctgcgttttctcaggattcattacataatccagtgcccgctttaaatgccttgcatgaaaagaattcccgctgtccttcatgtgaagtatcttactgattgccaatctttaccaccgcctcgctgacagattgattcagctttttcatatatgccacaagctgttccttatctttcttggaatacatctgagcattactgttaaatacaatctgattgatgttaatgccgattcggtttatctcattgataagctctttaagaagtttccttacttccggataatcatttggtttctgactgattagaagcctgatatattcggcttcattcattccatttgcctttgccttatcagaaagtaccttcgcttcctgtggcataagtcttagtgttttccttatacaatgaactttatcagccatagaatcaccttcctctcttacccgtactgtattctcttactccttctgctactgttacagcaactttttccagttctttattacccagctgggcaataaccctgtctgcaagctctgtagcaacttctataagttccttaccataactggttttatcaaacaatctgtccagtctcttttcatctgctttcagactttcatacttgctctgatactcgttataatcgttaaaatcctttggatcactcctgtgtgcttccgcatcaagtatcagttcatagttccattcacagacaatatctataacatcatctatcgggtatggttcaatttcaccattctcctcagctacatcctgcctgtacatcttcccatctgaatctatgccaatggcataatcatgtccttccatatagttaagcagaattgcagcatcttctatcgaagggtttagtaagatatcaaatgtgtctgcccaggcaataagttcctctggttctgcgattattgtaagttctttatccattgctttcctgcacctcccttatccgtgttttgtatatctcttccacccacacgcctgtctgaatctcttaggtttacggctagatacgcattagagacatctctgtcctaatgccatctagttagggagaaaatctccctaaaaccctctgtttatggaagtgggggcgctttttgcccccactttgctactttgggggcgctttctgcccccattttgttattttgggggcgctttctgcccccacatttatttttgttttcgtccggattttgtcgtgtccgaattgcgggggcgctttttgcccccactttgacattttgggggcgctttctgcccccactttgctgttttgggggcgctttctgcccccacacatcaaaatccggtttctcatgccctgactggttcatctgctcgcttattcatcctgttcagattaagctttgccgctacaagccactcgttgtaatccttatatccggcaggtggcggacagtcttctacctcatatccaagctcataatactttctcataagttcagctgctgcttttctccccggctcatctccatcaaggcagaaccggatggaagtaatctgcggatgttcccgaagaaaagtctcaagtggtgcatctgcaagcatcccaagtgccagcttatttgattcataatccgcgaagatatcgacataactcataaggtcgattgcagcctcaaatactacaagctctgtactgttttcattcaccacattaaatccatagttcttatcattgcctgtgacatcacacttgaatggcttgccctgcttatcaaacactccacgcatacttgcaaatcttgtcactccatttttatcatttcctttgaaaacaacattgtggtaatgcctgctctcataaatcagtccatcttttaaaaacagatctatgactgttctgctgattcctctctcctgattcagatatgaaataagataggaattatctcctgccggttccggtaggacaaatggctttctctcctctgcctgcttctgcgatacctgatgaacaagtggctgctttacaggattctcgattcttctgtatcctgcaaagtccagaagccagaacacagcctcttttacactcattccacaaaatacccgtaagaaatctatctgtgagccgccattgttgcctttgtcaaactgccttgaccatctgtaccaatggcttctgttatagatacggatggaatccatctcctttaaagtgtggtatttgccaatcctctttactgtatacccaaggcttccagcaattgcacacaggtcaacactctttgctatggcaagctcttcatccgtaaatcttccatccatgctttcaccttgcctttccctgctctgctacaagcggtgacttgatatcaagtgtcctgtaatctgtgcttagggtaatcttaggattatcaatcatgcctttttccctgaaactgaaaaattcacgattgtctccaccaactatgatatggtcaatgagtggtattcccatcaactcacacagcttgttcatgcggtccgtcatcatcgtgtctgccttgcttgggaatacgttcccggatggatgacaatgaattaacatcatgcttgcagcattgcttaggatgcttgatttaaacagttccctcggatgtgccattgcctcatttaaagagccaacacttgcaaaatgcacattgataggttttaaatctgaccttagattgaccacacacactacttccctgtcaaactggcacatacagtctcccatgacagcagctatatccgccggattgttaaaggtatgctccgaataaatcggagcatcctttacaagtcttaccgaaaccacatcaagcttgaagtcattcttctttggcatcagacaccgcctcctctccaaactcgacacggataacaaagtcacctttctgactgtttatgagagcaatgagttcttccattgtaagttcctgctccataactgcctcctatctggacttttccttcgcatcatatacaaggggaggttctgcaacgataccatcaagtctcttgtttggtgtatcagttgcaagtgtgagttttcttaaatccttatcatagtgatatacctgattggaaagtctctcgtccaaagacacctcctgcatatttacctcgactaccatctttgcaagcatctcagggcttcccatacctgaagatactgcaataacctcatgcacgctcgaagggagaatataaaggtcactctctaaactctctgccagctcatgaagctcattctcataaagcatggatgctgcaccattgatacccttttcattggaaatcacccacatcgtctgctccggtggaatctcggctatcatcatatctgcaatctcctgtggcatcccatcccttgcgaacatttctttcataatgtcattcatgcttcgtactacaggtgggaagagtcttcttgtgttttccgctgcacacttaaagagctgttcctcactcattccaagtcttttcgcaaattcatttgtaatttttgaactctgcaccgcatccttatcggcactgattattaccttatacacaatagaaagatcctggaactccctgtgaggcacctgttccaaaaatgttttattctgctctgtattgatgagctggaatacaatcttctcgttagcatccctcataatgctgtccacatcaacaaccggagtctgctcatatgccctttccataaaatcacatgcagccataagtgtttcctcaagatcgccacattcctgatacttcttatacatgtcattgatataaatcgtaggcgaaatgttcctgccttcttctcttaagatgatgccatcaagagtcacattcaccttttccactggctctgccacaagctccattcctttgaatttctcaggcatataatccataaacttttcttttactacttccttaaaaatctcgtaattcatcatattgatgttcctccttaatctaaaaaagcagggaacataagtcactggcttacattccccgcaaggttaattgttactgtttattctttttctttcttccacgaagtcctactccgacaccagtaataagtgcaagtgcaccgattccaagataaagaagcggatttgcattgtcgcctgtctgtggaagcttaggctctgtcggtacattgacaagcttaagtgttgttacaacaacttccggtgcattgtcatcatatcgaagagttacatcgtgagctgtttcatcaaggatatatccgtcagctgcttttgtctcaactactgtataatggatatcttccttaaatgaaccatcctcattgtaagtacagataggaagctccttgctctctgcatgaccattcttgtcagtagtgagtgtatcaagcacctttccgtccttatcccttacttcaaatacaacaccctcgatcggctttccggttactttgtcagttttctcaatgacaatcttaccgactgcctgttcatctttcatggataccttctggatttctgctgtctcctttacttcaaaggttacatcacttgccaccttatatccatatggtgcagattcctctctgagtgtgtactttccgacaggaagtctctcaatcatatgagtctttcctgcctctgatgtccagctctcaacaagctttccatcagcatcaataaccgaaagctttgctccaggcaattctttcttgcctgtgatatcagtctttgaaatttctaccttgatcggtgcattttcaaatgctgccttaaactcgataacctttaccttatctccctgatatgaagcatccacatcaaaaatcttatcagacttcacatagccctttggtgcctcaatctctttgacataatactgtccaagcggaaggtcagaggtaaatgttactttgccatcctttccagtaacacctctctcaatctgtgtatctgctttgacaatgacttttccatctttatttacgatatcctctttcgcaaataagccgaatactgcaccttcaagagcattcttcgtctctgaatcagtctttgtgacagtaatctgcaccttctgtctctcattggttacatccattcccgcaaatacaacctttgtattctggtcgatataagaaaggtctgcatcaatcggtgtatcatccagcacaaatccatctaatgtctttgtctctacaagataatacttgccaagtggaaggtcatcaattcttgcaatgcccttatcgttcgtaacaatggttgctaccttgtcaccagctttgtggtatacagttccaagtccgtctgcactcacaatatcctcttttgcatatacatcaaaggttactcctgcgagactatccttgaagtaattgaaaatgaaatcataccagtgtcccttcataagagtggtatctgttacaaactcaccatccttgttgatcacgatagaacctgtcggaacctcgtccttcatctcgacatgctgcacatcgcctgtatcctctactgtaaactgaatatcggttgctttcaggtatccgtatggagcaaactcctcacgaagtgtgtaagtctcgccaactacaagcttcttgattacatgagcttcctttgcatcagatgtccaagtgtctaccacatttccatccttatcaagtacagtaagtgttgcaccactaagctctgcgccacttgtaatatccgtctttgtaaattcaaaggttgtcggagtatttttatactcgctgctatatacagcagttttcacatcctgtccctgatacttggtatcaaaggttactacctcttcgtttgtcacatatccggcaggcttttcaatctcttttgcaacatactttgcaaacggataatccttaacaaaagcaatctttccgttttcatcagaagttgctttctcaaggagtgtacccttttcgatgattaccttgccatccacattcttgatatcctcatctgcgaaaagtccgaacactgcacctgcaatcggtgtgttgtcctctgaatcaagctttgtaactgacatatcaagtttctgtctgtcatctgagaaagtaaggctttctttgataacaggtgtcttatcatccacataagtgaatgtgactgtctgctcattcggatttaatacatatccgtcaggagcagttacttctacaaccttatactgtccaagaggaaggttctttgctactgcctttccatcttttcctgttgtaagagttgccacaaggtcgcccttgctgtaatactttgtacggttgccatctgcgtctttctggttgtctgctgtgaaaatatcttccgctgcatacaccttgaatactgctcctgcaagtgaaccctctttatagacaaactccttatcctcagagtttgcaaaaagtccgcccttaaatccgtcaagtacctctcccttcttttcaacagtaagctctcctactgccggggcatcagaatattccactgtgatgatggcatcattggtatctccatcagtctcaaatgctgtgtctgtatcaaccgaaatgttgatatagttatcgtttaccacatatccgaatggtgcttttatctcttcaatgcggtagtttccgattttaagtgcttctggtaagattaaatcgccatcctcatccgtaaagaatgaagtatgcttaacctttgacggataagtcgtgtactgggttacatattcgttcttatcaagattgaaaatcttaaactcagcatttggtacaagtactgtctgctttgtatcagaatccttcttgattacacgaagctttgctgtaaactccctgtctaagaaaactctccatgtctgaggctctgttggatggttctccttaatctttacctcaaatggctttatagttttcatattgtgaggagtctttgactcaattaccacataggttccataaggaattgcgatggaaactgcatgtcccttgtcatcggatgtgattgttgttgcaccgttttctccgattattacaggtgttgccttatcaaagtcatagcttccatcttcctttacaggtaaagatgattttaaataagctgtaaactctgctcctgcaagaagtcctgcttcggtatcatcgccattgtccgataccttgataagctggaatggctgcttgataacctgctctgcggaagttgtacttcttgatacctctgctactaagtctccctcgtagtcgcatactacatcatgctcctcttcatctaaaagatagccttctgatggtgtgatttctttcacataatagttgccaagataaaggttattgacctctgcctcgccattcttatctgttgtaagagttgtaactaagtcccctgctttaaatacaacacccgttgctccgtccggatgctggatattgtttctggcataaagaccatagacagctccttcaaggcttgcatctccctgtggaactgctttgcccgattccttatctaccttgtaaatatgaatctttgctgtggttctgtcattcttaaatgtgtggctgaatgttgcctttgcctgtgtttcaggcaatacattgaagttgaaactatacacatcagactggtttctgatataagcgtatggtgcctgtgtctctgagatataatatccgtttgaaataggcagatccacgctgtagcttgcctttccgtcctcacctgtagttactgtctcaagagctgtaccctttgtgacaataacctgtccggcatagtttttgatgtcatttccggcataaagtgtgtacttgccaccatcaagagggttctctgtgtcagagtccttctttacgacagatacatccgctttctgtcttgtattctcaatcgtagttgattcatactgtactgtcacagtctggtccttatactcaactgctactgtctgaggtgtggtattgattgtatacccgtcaatgctcttaatctcagttaccacataagttccaagatgaaggtcagataataccacctgtccgtcagttcctgttgtaaggctttctgccacaacatcgccagcactatacacctttgtaccatctgccttatagatatctgctccggcagttaccttaaaggttgctccggaaagcttctttttctcataagtgaaattgcttccattccatgagctaagcacctcaccctctttatagattgtgattgctccaagctgctctttatctgttgcagagattcccgttgtctgtcctgcttttacagtaagtgtatgaactgtaccggaaaggacatatccctttggtgcggtaatctcttttacataataagtgcctgcgacaagtgcagctgactttgcatatccgtttccatctgttgtcatggtctgtactctgtttgtgcatccgctatcagaatagattccataaactgcaccggaaagcttcactccgcttgactcatctgtctttgtaagctcaccatatccgatgttctctgtcttgaccttgatataggctttgacaggatctgctgtcggtctttcagaaataaactcctgatatccgctctttcctgtaagccagaatacacagcttgatgttgtctcaaccttgccagcattggatgtgaatgttcctgttgtagctgtagtattcacgctcgttgaagagattgtaatactgttgccattcttatcaacagaatatccgctgatgccaaaatcaaagtctgataagacaccattgctgtcagataatgttgtttcaaatctctgacttccctcattccactttaattcataagttggtgcctcactggttctgcgtgatgcaaaacttggaagtgttgcattgtaggagctgctgatattgtccctgagtctctcataatagctgtatgaagaatcaggacttggtgctgtgttacagagctttcttgctgccgaatcaccacttccggttccaaagatatctgctacaataacccataccattgcctgagttgcgatatactcatcgcactgactgttgcttggtgccgccttttgtgtactgttaaacccataataaaggcagtaacttaaaagctttctctgctgtgctgacattgatgtgctcgcatcatcgtagctgttcataagctgaccgccatctgctcttaatccgaaattcatacaatatgcagaatttccgtcaagaattgaatacagaatcttgccatgattatatccgggcttcagctcacttacttctccggaatttttgactgacgcattccagaacgcaatatttgcctgcggactggctgcaaatgctgttgtaccattcgtaaagagtgttccaaccagtgtgagcatagccataaatcctgccataaaacgctttagtttctgtttcatgtgctctttcctccttaatttacgcataaaaaaagaaagacataagtttatggcttacatctttctcccttctgcttctattcgtttttatttatctgtgacatcgaaactcgtaatagtctgtgccgcctgtcgtgtaaactccatcataactgatgtagaataccggatctgtttccaaaagtaacatacttgcaatatattctgcgattgcatcctcagatgataaccgctgtccatcaatggtacttgctttgttgaggtctgtctctacaaacacactataataagagccttccataccatcgtaaggataatactcattgtactcttcctgcgtgatactgccgtcattcaaatgattctgtaaattctgctgtgtggtaatcatccctcctgcctgacactttgctgttgcaagtgacacaacattctgtggactgtacgccacggatgcaggctgtggattgctcacattgtctttcggactgtctgtagtctgaccaccattacctgcattactctgatttccaccagcttccttattaccacttgcaggagctttctgttccggctcgtcattctgctctgacttttctttctgctttgaagcagtttcattatcagcagactggttatcttccttatcagtcttctctcctgaatctttaacctcggcaatatctttctctgtctcttcacttccagcttcggttgtgacctctgtgacagcttccgttgccatttctgcttcttcagttggctttacgctttccgtctgtttctctgtctgattatcagccttttccttatcaccattacaggcagccattgaaaagaccagtactgcggataataagataatacttatcttcttcatagtaatcacccatcccttctcctcaagagggacgggctttgtgttccgtgccatccacccttgcggtgaactatttatctgtaatgcacgggacacataggactgtcccgtattctgtgcatcttaaactcctttcattataccagctctcttattttaaagaaatactgcataagtcttctgtttttcttataattcaagaataaaccctttgcctgcatatatgctcacctcctctcagaatgtgcccattcttacgaatgaaagaaatacccttgccaccatagcgaatagaagaagaattattctggcaagtcctaagaccagcttcaaagctccaagaattatccttaatatccacttgagtatctctaaaattactgttcctacggctcccataactcttctcataataatcagtctcctttcgacatccatcccattgcaagtcctgcaacatctgcatcgtccataacatcttctgtaggttcttgtgcttcactattggctgcctgcattattaccggctgaccaacattcatcccggatatcactccgcctaacagctttattacctctttcctagcctcattggttgctgcttcaatgacctcttccttaatgtcatcaatatcttctgaccggatatattcagccctctctttttccttcttcttgataacaaaggtttcttttccataattatcaatgtaaaactgaatcgcatctatgatgaactgattcttagatttgaaaatcttcggatcaaggttctgaatcacatcattgattttcacatgctgaggattgctcatgttaaggcggacagaagtttttacttcatattcaagtcttcttcccatcatctgcctccttatgataatcgcttagtgcttttaagtcccattgtggcaagctgctcatatcctcttgcatttgcctttacatcaaggttataggaaatgttcttagcatcgtgactcccaaaattcttcatcacaactgccccgcctccgacaaatacaatcggtgtagtctttaagttatacccaaactcacggattgagttatataccttatcaacaaaatcctctatctctgccttaataatggcaaagtattcatcatcaatatctgacctgccatatctcatgatgttctgtatctctgactcgtctacctctccgttaagctgtcttacacactgctcattgatagaacgcatacaggtaataagacctttgggaatcgtcacacactttgattcatccggagacttgttgattaccggcataatgtcgattgtccagcttccaatatctactatcagtgttttctttgccatagcaggaatcttgtccactactgctgcatagcactgaggaaatactgccacatcatcaatttcaatatgatatgactcattctcatatttgaagcttacacgcttattctttgtcaggtacttgataaaatcattcttctctgctccaaaccttgtaagcggaagtcctacagcaaggaatacctttgcctctgcaagacctcttcttttaagttccttagcaactgctgcaagagtgagaagataaaagctgtcatcttcgaccttggtatcctttacttcctgcctcacagttccaaccttatagaactttccttcatactcaagtacatcgccgaaaagtgccggagttgttgtaatctccttaacacctgtgacaaatacctgagagattgttttcatcattgaccagccatgatcaatgccgattacttctaacttgttattcatgttcctttcactccttttctgtattgtctgcattattgttttgcaaaatttcatataattacccacaccctttcaagtgctcggttttgtcagatgcaagaatatcttctgacctgccataaaaatgctttctcattaattcctcatacagttcatcactctctgccttaactttcataagacagtaaagaaccactatactaataatgattacgaaccaaattaacaccttgcccattcgaccactcctctcaaataaaaagaggaccaaatcagctgatggaatattccatctcaagtgctaatttagtcctcactaaatgtttttgatataaaattgtacctaatctaagcgcacagattcactctcagactgattgtggacatctgtgatactgacttggattttcggtttaatattgcagcgctgccctatctttaccgctaaaatggtataaaaataaggactaaattaggcataaccccttgattttactgggtttcatctaacttggtcctattataactcaaacaccacgttcccatttactaactgttttatccgacacaaacaacttatctgctaagtccttttgtgtcatttgtttttcttttcgcacttcggctaaaaagtgtccgaatttttcattgttgatttgatacatttgtgccacctcctatcgttattttaaccatttacgataaggtaggcaatctactaacgggagagtaccgctatttttctaacctatgagaagaatttttattttttcggctatccctgcggtgtaggggactgtggactgcctgcgttctgattgcctttattcttcaacacaatatcctctgcctttacataccagtccacatctgcacccgtataggtttttcgtgataccgtatcagctacgggattgacaagctccacgactgcattgtacggaaattcccttaatgatacttctggcggtacagacactgggataatgccaccatgcagactgcacttcaaatcataaatacgctttttaatctgggtactctgtgtcccgtcctcattctgtaagaacacatcacgcacggaaaactggttactcccagataatacggcaaggtcgccgtcctcggtaatctgtgtaaggtataagccttttatctgttcggacttatcgccagcctgcatatataaactgtcgccagatactttgtatgcgtccgctaattttgtgatgtaatgagttgtcccgtcgctgtctgtttcagcgattgtctttgtaacccatgtacgagtagcttcggcagggagattgtctttagtatagaagcctgcataatacttccatgtaaattccgcacctgctaaagaagcttttccctgcggattgtctttttatgtttccatatcaatcttgaaaagctcaatcaaagtgtccgttacttttggtgtatctgatactttcaaagtcgcttctgcaatttcttcgtcaagtacatggatttctgtaccgcacacatcgaatattgtatattcactttcgtaatcgtcccatacaatcaatttctcaacaacaatctctggaagcttacaaaaggatacttcctttgcctgtcgtctggctaattccttgcggtagttacggacaatgcctttcacaacctttttgagcttacagtcaaactgacactgtattgtcttttgtaagtctgatggtttcaaaatcacaccccctagtataataatggtgaaaagtatgtatccctctttccgcaccatatctgtacggcagggtgtgatttgttgcaggattgaaaaagtttttgtaaatatgaaaacagcctatttgcatcaataacagatagactgtttttaaaacatctgatatatgagtttttgcttcttgttttctctgttttcctatacagattcttcaacatttatttgttgatctgctccgcaggcaacaaataagagccgactatccttatttctttatcgtaaatttacttgttacacagtaatgaaaaaagccaatagtttgtaactgaactttacaaactattgactttacattttgatgcccactcttcaatgaattatcatacgaatatatcttcaatactttataattcaaaagtaataataaggctattggcatgtacttttgcaacaatatttccgccaagaatggcaacgagtgtttttactaccgcaagtcccaatcctgtacttccattatgtcttgatttatcgcctgtataaaaacggtcaaaaagtcgattgcaatcaatttctgaactgtcactcattggattttcaatggtaaatataatattattattttctttctccataagtgttatttttatcgttccaacagaatacttaattgcatttgtcaacagattttgtaaaattcgttctaccatatttttatcagaatatacgtatattgaataatctgggagatttatttcgggtaaaatattctccttttctaatgcaacggcattttccgtaattaaatttattaacatattagatatattaaacatttctttttctggaactgtctgctgttcctccaaaatagaaaggtcatagaatgtttctaccaattctttcattttttcggctttgctaaaaatcacttttacacgctgtgcttgactggattcccaattttctttttgcaataattgtaaatgaccaagaatgactgtaagaggtgtacgcaaatcatgtgatatattagcaacagattcttttaaatactcttcattgcgtaatacgcctgcaacagcctgtcgttgtctgatattatattgattcaatataccagccagtctttctaaatctttatcaatcaacgaaatgtctaacatctgctgtgaatttccagaattcaattcattaacttgatccgcaagattacggatttgtttttttaattgaatatatcgaaatagcagtattactaaaaatattgttatgataattaaaatccattctatgttagtaaacgtcaaaccatgcgccagtcattaaaatcaacgccgcccattattggcgacgtggcttcctgcattcgtccggaagactatctgaccatggcatgagatagtccagcttttctggatctatattttctttttcttcacagagttttggcagttctgtgaggatatatttaaaataataatacggccgcagattattcagcttggctgtttctgaaatactgtataccatcgcactggcagatgctcctttggctgtattgtggaacatccagtttttcttgccgaggcaaaaggtgcgtatggctctctccgaggcagaattatcgatagggacatctccatcttcaagaaataccttaagatatttttcctgattgattatgaaattcagcccctggcctgttttggattttggaggtaccgcacagtcgttaacctgttgttttacccacgcaaaaaattcctcaaccagcggccggatcaattcctgccgtttttgaagccgttcctctgatgagagcccttttaactcagtgtcagcattataaaacccggctatcttctgcaatgcctgataggcaacagactgccttacagaagacggatcctttttatcggcagccttaaccgcatccgcaaaatcacgccttgcatgcgcccagcagtttgcgtttgtcacatctggaagctttttatcaactagatgatattgctgcaggctgtccgttacaaggattcctttgtaatccttgtaaaaatccagaggcttttgatgatcacgtcctttttggtactcatatatcacaatcgggcgtcgggtataaaactctccggaacggtgcacccacatatagcacttgctgtttgggtggtcgctgtctgctattacttgagtcggtgtttcatctgactgtgtgacatgcagtgacagcagctcctgcttcatccgttcaacaaacggagtgaagtacatctgggagcatctgacaatccagttggacattgtctggcgtgatatatttacgccattacgttgaaactcctgctcaatccggtgtaatgctgatgaattcacatattttacattaagtattgatgccagtaatgatggcgtcactatactgttgcgaagcaagtccttgggtctgtttccacgaaggaactcatcctgatgatcaccatcagttcccacatacacctcgacagtatgaatttcgacagtccatgcttcgggctcatgacgaagcctcttgtaggtttcatccggcatacggcgccaattgccttttccataaaaagcatccagctgttcttcagaaacactgtatggcggaagtatttcttccgggaaatctttcaggtcgatattccgctgcccttttttctttgtacgcttggcagtaatgacctcttcagcagaaggctccctggaagattcatcataggcggcgtccgcttcgtcaaaaaacgaaagctggccttcgattgattttaagctctctgtatgcctgccaaatctataattattggcaatgcggacctgctcaatgagtttttcgatgttatcatttaaagcatcgagctgtccctgcatcataagaacaatggtaatcagttcttcgcggctgcaattattcagttcttccaatgtatgtttctgtgccattgcttcactcccttaaactgttttcattataacagaagcagctttaattagcgaattcttgtgtgttagctctccgtcattatgcctatcgctataaggctataggatgctgataaacgcagggaaatatagagctttcaaatttcaagatatttgtttcaagtaacagctaaccattgtaccagttgtgaaaaaggcatataaaccaggttcaactatagattttttgacgtcataaatgtctttgaaaaatctctgttttgcacaaactcagaagggattttgtggtgttacatccttgattttaggatcgagcggatttaaaccgagcatcaggtaatcgaattgctcttcggtaagatccgcagcgtcttccgtggttcttggccaggatagtgaaccggattcaatccgtttatacagcaaaagaaatccatcgcccatccaaagcagtcctttaatcctgtcggaacgtctaccgcagaacaggaacaaggttcctttctcaaaaggattctgcttatatttgtcaccaatgatcatcgagagaccatcaatgcctttgcgcagatccactgtaccacacgcaagcacaacccgattgattttagcaacgttctccagcatggactacctcctttaagagcctgcttagcacagcatctgaaacatcgtttgatatttcgagaatgatatcaccattcctgacaactgcagtcgcgttagaagctgacgaaaattcccgtgtttgaatagttttctctgatgtaacaggggcagctatttcaacaaaagaaatttcggcaggattttcggttgttacaggcagctgcatctggtcgtatgattctttacgaaacttgcgcagccagtaataataagatttttccttgatatcattgtctttcagccattgatggacagttacgtttgcaggtcgttcctgacattgatttatgatatttaaccagttagcacgccttacatcgtgagtacatttatccatgatagtttgcctcctctaaaaaactattagttttttcgtgtcttatagagtgtctcacaaaaatgctaattatccaaggcgcgtggtttgacgtttacctatgttagacattttctccacctatttaaaatcacatttacaaaattttatccacgaaagcaataccaatataccagaccatatacatcctactaaaatagctatcggttgaaaaaaggttttcatgctgacaacgattctgatttgataagtaggtaaaaaaccgactggtaatctcaacatcattccatagccaagatataagctaagaccaaaaataataattgctgtaaccgaagttgcttttacaacatcctgtaaatagcaacaaataagtattgcaattagaaatatcgcactattaagcagacaagaataaatgattgcttttataatattgtaaaaaaacattcccacgtctgcaacaccaaagcgtccaaattcccttatgcaccctgaaactggatagacaagagccataagattaaaagcaattaaatacgatattattttacttgtaaaaatttgttttctggaatgtccagcactgacctctaagtttattgttctcttagaaaattcctgtcctaaaatcaatgcaagtatagccgacatgatgataagaagaaacgtagaatcatacaccattccattaaaaatatcagcaagagaagaagcaatttcttctgtcggtcccatgacctctgtaacataagtatctgctgtaaaaaatcctaaaataaatattccaatcataccacaccagtaaatagaattatgtaacaactgatatttttccagttttaataatttatccataaaaaacacctccggttatttcaagtctgtatgtaaaaaagcactacctgcaatgaaatataaaataaaattccataaaaaatctacaaacaagcaaaagtttgtcgaatagaccttttgcaatgaaattaacctaagttgtcccattggtattattctgctgattatttgtgcagattcactgttcagcaaaaaaatcataacaaaaaatagaaccattgaaactgtcagtgttttccccatatcacgaaaaataaaagcaaaaaacatcggtaatgcacacagtgttatcatggcaaacagagttagtaaaaccaaagtatatgtgctatcattccaaaaaagtttttctccaatataaaattgactaataattccatgtacaaataatggaaataccagaatgataatacaacctatttgagatacaattaactttactctaaatatagaacttcttttatgtccggcagtaatataagtatttaaagttcttccactaaaatcacttccaatgaacaatgctataaacactataatcaaaaaatagagtaacggaatattgtataatgatgccataattaagtttgaagagcgttctttactatctaacagcaatatgctacttaaaaggagattgaatattccaattccccaaaaataccaactgtgaaacaacttatataactcagtttttaggagatttgacatcttttgttcctcctattttgctcaaaaaatagtcctccaaagtatcgccagatacagaaagtcctgttacaagaatgtgcgattctgccaaagcagacgcaactgtctctaaatcattcaaataatcatacaaacgaattatgccatctggcattagtttaaagttatctgtatgaagattctcttccaaaaccagaaccgttttctgaacatctgttgttttaattgctatatgtcgtttacaccgttcatttaattcataatcagaaatctcttctataatttttccatggtcaatcagaataaattctgatgctgtttgatacaattcttctaagatatggcttgaaaccaaaatggtcatactatattctttattcaaaatttttaataaatttctgatttctacaattccagcagggtcaagaccattgataggctcgtctaaaatcaatagttctggtgtatttaaaagtgcaatcgctatccccaatcgttgacgcatacctaatgaaaaattgcggacactctttttacctgtatcttgcaatccaaccatatctaatgtccttttaataactgatttatctggtatgcctcgttgaatacgctgtacttccatattttgataggcagtcattgacgggaatagagcaggcgtttcaatcatacttccaattcgtttacgctgtttctgcaattcttctgttccagaatttccccataaagaaagtgtaccacttgttggaaacgcaagccctgtgactaatcttaaaaaagtagtcttacctgctccgttttgaccaataaatccataaatttttcctttttttatttgtaaatttatgtggtctaatgctaatgtttgtttatattctttggttaaagactttgcttctaaaataattgaactcatatctcaaacctcctttacttaaaccagtataacgggcaattttaaagaatttcttaaatcgtaatgagaaaagttaaaaaaataataaagctaaggaacgtttaatccttagctttatgtaggcggtagccaatgccccaaacagtatcaataaattctgtatcagagcatatcgcttttaatttattgcgtaaattactgatatgaacattaagtgtattatcttcagcaatatattctgtatcccaaacactttgaaaaagattcgattttgaaaatactttatctggatatttcatcaacaattctaaaatgccaaattctttagcggttaaggataattctattccatttaaaaatgctgtatttttctctaggtctaaagtcagattgttatgttgcaaacattctgtctggctattttgaaattgtactcttcgcagattactttcaattctggcaagcacttcttccatatcaaaaggttttgtgatataatcgtctgctcccagacgaagcaagtcgattttattttgtgtagtttctttcgctgaaataataataacaggtatcgtaaatttcttacgtacatcagataaaataatatcaccactccgataaggaagcataatatcaagtataatcaaatcaattttttctttattcaagaaatccagaacatgaagtccatcatattggcaatgcacagcatatcctttttcttttagaaaatcagctaataacgcatttatttctaaatcatcttcaataatcaatattttattcattagcctacctcattcctgcaatgctactttcccattatacatttaaggttgtatttcctcaataccattgcaaccaattatatgagagggattcttattttgtcaatctaattgtaagcagaatagtatagattggataaacaattaccatactattctgctgtaacatttattctacaatcttccagttatcgtccttatgaagcacaagctcatactgtgagatttgcgtcattttcgacttgttatccagatactttacggacacgctgactttgaggttgtcgccgtctttggtaaagacagggtttatcagttccgaaaatacatagtcgccggatacaggagcaatcacaccgtctttgacatagtaggcaagttccttttccgtagctgtcggatagagcttaaagaatgtttccaagaaagcggtagcatccttaactgtgtcggaactgacactgacatcggcttcctgtactttcggttcatactttgatttctgcactgccggagcaagggtaggattctgtgtgatgaccattgcaccgtccttatccacatgaacggtcactgtgtagttttctgtgactgcctgtgtctgttcgccctcttttacctgctgatctacttcgtaggcaacagtaaaatcgtccgttccagactgtcccacgttccagaccagcacatttgtaacagtagcactggttggtataattgtctatatcccgtcctgcatacattactctaagtattgttacaaccattcaaaaattcctctcaaatcactatcagcctgttctgatacttctatttcatatatcataagccatagtctttgcgaatatcagaaaaggctttcttagcattttttgtccgtccagcctgcatatccgcatatcccttctctaattcttcattgaactctacctctgataatgcgctgatatcaacaggtctggcagatggtatttttacttcaaacggaagacctctctgtaagataatctgcatataaaacatctccttcctgccatatttttatgttatgcaaaacctccgaacggctttaggccataattcagttattattattcctaatcaaaatctgtatgattttatcataattttccggtctgtgtggaaacgtacaatctgtgcataccttgatttttttgccattcttctctatgtaggtcttacttcctggacagtttggcatactatacataggacaataacaaaacagacaattaaagtcatccgaaagtcccttgtgacacggaaaatatttgcaatctgtgtttttaaagtatttataagagttttccatttttattccttctatattcatatgattttctcacaaggctctctgcaaaatgcggatttgacggataatacaggtgcggaaacccaagccagtaattatcatggcttatcacgcagtcgtagcttctgcctgtggccggcttggtcgcaatacaatcggctccgttatcggtgctgtcgtaataatgaaattcatgcgcctttattttttcatttggcgctaaaaaattgctatgcttttccgcaagctcaatatatccgaacctgaccagctttcccttaaaatgacacccaccatctaatgcgcccacaagctgcgacttattcatatcattttgtatatctgctttattttgtgtatcagcattgtttttttcatcattatcatcacagatgttacggatatatgtgtgaagatacataaatcctccacactctgcaaccgtcggcattccggctctaaaagctttttttattgcattcagcatagatacgtttttactcagttcctttgcatacagctccggataaccgcctccaagcagcattgcatcacaatcctctggaaggctggtatcgtgcagtggcgaaaaatactgtaattgtgctccgcatttttcgagcattcttaggttatcttcatagtaaaaacaaaaggcttcgtccatggcaacagctatgtttacggtattattttggtcttgaagcctcataagctctgcattttttaaggttttacgcttatctttatctgcacttccgctgtcactaatttcatctgccgcttctgctatatctataaacaaatccatatctattgtcttttttagtctgtcggcagtttcattgagctgtttttttatatctgaaagctcatccggcatgacaagccccagatgtctgcttgaaagcccgatatccttctgttccgggaaatatccgactacttttacggaaagctccttctctatcagaggctttatgatgtcataatagcccttcgacatccgattgagcagaacccccttgatcaagtggtgagtgtcatactgcaaaaaaccggctataagagcaagcactgactttcccatgccctttgcgtccaccacgagtattatcggagtctgcgtcacctttgccagatggtatgacgaaccctgctcatatattccgccaagtccgtcatataatcccatcacgccctcaagcaccgcaaaatcaccatcggctctttcatctaagaaaagctgcactgttgtcttttcgtccgtaaaaaacgtatcgagatttttggatggtacgccaagcacctttttgtgaaacattgggtcaatataatcaggtccgcacttatatgacaatacgttttttccgctatcctttaatagctgcagtaaagcgcaggttatcattgtttttccactgccgctttttggtgcggctatcataaaacgatttattttcatgtattcatcctttatttcatcatatatcttaaaatatcagcctccgatgatttattacgggttgtagcataaaagcccaggttaaaattcaaatgaacatatccacaccggattttctgcctgcatcagatggtaatgtcctatctgctttgagcggctgacctgcaactgcacgatatcctcatttttcacatcatatgccgacaatatttcctttatctcacaaattgtttccatggaaattgcatttatcactatacggatatgtggattttttgctttaagagcctctattatttcctttagattgccaccgctgcctccgataaatgcgtgtgtcggcaccggaagattgtccatcccgtcaggagcctttgcgtttataacatggatattttcaagtccatgcttttctttattttgcgtgataagctgcacggcattttccttctgctcgatggcatagacctccatatcatcggaaagtgatgcggcctctaccgctatggagccggttccgcttcccacatcataaagcactgaatccgatttcaaatgaagcttgcagatgcttacatgccttatttcctctttggtcatcggaaccttttcacggataaatgctgcatcacttagctgcggtgtaacattttttgcaaccggattgggattttttatcatgcagatatacagtccctcccttttaagctttgtgcactcctgcggcgaaagctgcgatatagtttcatccggatatgatagctggtatcccacagttaccgagcatttttgtaaaccatacctttcgtcactgcttaataggtgtccaagcatatttacgtccctgactccggacatcagcataaatgtttttgcatggtggctaatccgtgatgtgatattagacagcttaactccatggatgctgcaaatatatgcatcgctgtaggtttcaccgactgctgccgccatatatgacacagatgaaattccaggaaggattgacacatccgcatttaattttccttcagatatttcattttttatcgccagatacagctttttgcttccactgtaaaagcctgtatctcccgagaataatataagaacattactgatttttgcagtatctgcacaaatttcatgcagatatgggataatctgttctgcaagataatacggctttttgtctatcttcgcactgtatttttctatcatacggcttgcgccaagtataatatcagcgctttctattgcatctgaaacagcttttgtcatgcaagcatcatttcccattccaatgccggcaagcatgatacgaagcttgttatatttactgtcaatatattcacagacagcttcaaatgacattccatcatcctgcacgctttgccccacaatatagaccggaatatttttattttttgcggcagctattttctcaataaagcccccggccgcaccgctttttttggtgaccagacatctgatatcatactgatcaataagcgcctcattaagctgtgtgctaaacggtccctgcaatgccagaatgtgctttcctgtaatatcattgtgcatgcacaagcttatgctctcaagccccggaagcacgcgcacatacaatctatccctaacgtctgaggttttacaatacactgacagctccttgcttcctgttgtgagcagtatatttccgtctgtattgttaagtgcctttgcacatgcttcattgtcctcaaaatagcggatattatcataatctgctgatatatccgtatctcttttaagacgcacatattcaatattttctgatatgctgctatccgcctgattgtctgtaacagcatgtgcctcgttaaacgcataaactgcctgctttatattttcggtaactatggctgcatacggatgggttgcatccactatgagcttacatttttgttccgcaaagaagcttctcatgccttcgctgtccatacgccccatatgaacatgcgcaaacggattttcctgcagcacgatttcaccatactcggttgccacacaaaccgtatgctctatgcctctttcacacagatgctctgatagcttacgtccctctgttgttcctgcaaaaatcagtattttactcaatctgatatcctctccttgtgacaagctttccgtcaattatttgtgtaccctcattgccgataaatactgtcgtaaacatgttaacctgtgcactgcggagctcaccgagggtacagaccgtatagcttgttccctcacgtccgatattttcgacatagccgcaggctctatccggctctatcgcacgaagcagaatatcacaggctctcatcagatagtcctttctcttgtgacttgacggattgtacagtgctatgacaaaatcaccctctgcagcagccacaagacgcttttcaatcttatcccacggcgttagcaggtcacttaagctgatggtacaaaaatcatggtttaatggtgctccaagcactgccgcaccactgtttgccgctgtaatgccgggtattaccgaaagctctacgttatcgtattcctgcccaatctcatacataagagaggccagtccgtatattccggcatcgccactacatacaagggagactgttttgccctcaagtgcctttttaaagcacagatgacatctttctttttcctgacgcattggagtggtcaaaagctctttggtctggaatttttctccaagcagctttatatatacggtgtatcccactatgacatcactcgcttccagggcgtcaatcgcctgctttgtcatcatgctttcaaagcccggccccatacctactatgtaaattttattcatgttaatctccatctctactaattttatgtaaccatgcagctatttgcaattatatttaatgatatgagggtcaaaaggtattttgcccctcatttatgattaatcaggataccttgctgccgcaaccgttaccctgtcatatttatgttttttataaataagttctcctgctttattacattccctgctgcatgcaagcactgctgcacgctcgcacacgttgtccactccaacatgctccctgacaaactgcgaggcactgaattctccctgcactgtcatgagctcatccgcggtataagtgacaaattctatcctgtttctatcgcaaaattgctttattcccggttcatcttttttcacatctattgatgcaatcatgtctatatccgaaatatctatttgcagctttaaaagactttgtctgattgccctgtcaatattttcaaacgctgtatcgcttctgcacccaataccaagtacaaattgtgtgggttttaagtaaatactgccatttttagggtcctttgctttttcgcatgatactacaatatcagctccgtaagcaggtgggaagtccactgtttttattgcatcagcactcatatcagcttcatcgaaaaatgcctttataagctgcctatgcttagccgggatgtgctcccagtcgaccgacatagtaaccacttcccccgccaatacctttgatgatactctggcaatgccatctttattgactattgcaagcctgcatttctttgcaaaaacatcaactgcaaatttattattgatatcagtagcggttgttataacaggtgtggcattcatcagtgctgctaatattacagcaagctcattggcacctcccacatgccctgaaagaatcggaataacaaactgccccagctcatctatcacaataacaggactgtctttaagcttgttatttacagaagaagctatagccctcactgcaataccgcatgccccgataaaaatcatagcctttttttcactcatctgtgcagctgtccagtctgatatattttgtgatatgtaggtgatatttctataattttcatcggtggaatttttaatattctcatccgataatctcgagcacttggtaaaaacctccacatcatatgcacttttttttagcttataagctatgtcacatgacagctcatagcccttttttgtgaagcttacaatgcaaattttcatattttcagttcccatatatttctcatatttatatattcacgccttttttcaatcgttatcctttgactctactgaagccttgcgatactctgtcgaaaaatccggtgcgtaaagtcttgatttctcgtaatgcctgtgagctatgacatcccccacaagcactatcgctgtctttgtgatattgtgctctctcgcagtctgcttaagtgtagcgacagtgcacacgtatgcctcctcctgtggccaggttgccttgtatacaattgcagcaggtgtatctgccgcgtatcctccctcaataaggctttccgtaagcttctctaaaagcccggtgcttaagtaaatcgccatggaagcgtggtgtgcggcaaagcttgctatgctctccttaggcggcaccttcgtgcgcccctccatgcgtgtgatgatgagcgactgggaaataccggggagcgtgtactcaatgttgagcgatgcagcagcgccaaagcacgcgctcacgcccggacagctctcatatggtattaaaagggtatcaagctcatccatctgctcgcgcactgcgccgtatatgcttggctctcccgtgtgcaggcgcacagtcatttttccgtcagcctcagcagctttcatgactgcgatgacctcatccagtgtcatttttgcactgttatatatttcacagctctcccttgcatagtccaaaagctctggattaacaagcgagcctgcataaattatcacatctgccttttgtaaaagacgcattccgcgtactgttatcaaatctgctgcgcctgttcctgcgccaacaaaataaaccatttttctgcctttctgctttttgcaagctcaccaaattcgtttgaatacatgatacagtctatctcaagtctgccctttgccctcttatccagataaaagcatatgcgctccatcgcataatccatcacctcatacagcctgccgctttccttaagtgacgccaaggcctcctctgtcgtaaggctgtccataatgcgctttatgtattcgggcgctacaccacacttaaacgcaaatgccgtcaaaagctctatcctgcagtctgcttccctcgaatgagtgttcatgatgcctcctgctacctttatgagctttcctatatgtcctgtcaaaagcatcctcttaaagcccatatctgctgccatatcaattgtttcaccgataaagttggagcatttgacactcctgtccagatcatagccataactttccttcataaagtcaagaccgtaatttcccggcgcaaccgccacataatcatacccaaacgaatatctctgcctaagctccacccttatcgtatcaataagagcctgtgagctcatgggctcaacaataccgcttgtgccgagaattgatataccaccaactatcccaagcctcggattaaaggtcttttctgcaagcgcctttccctttggaaccgagattgtgatgtcaagtgtccccttaaaatccaaaagctcacagacctcccttacctctttttcaatcatctcacgcggcacatgattgatagccgcatttccgacaggctggtctaatccgggtttggtgactcttcccactccgtcaccaccgtctatatttatgataaccaaatcctgcctttttttgcacaaagcagatgtatctgaatgcaaaatccgtacagaagcatatatataggctccggtggtcacatccgggtcatcccctccatcctttatcacggcgcagcttacctcgttttcacttctttttatgtcagtgatatcagccgtgtaagctattcccttaggtgtctgaatcgttattttgtttttagcctttccggttaaaagcatatatgccgccgcctttgatgccgccgcagcacagcttcctgtggtaaatccgtatctcataatcactaaatttcctcatgcatcaggctctatcaaccagactgtaaatcagcgcattgcatatggcagccgcaatattgctgccaccctttcgtccgacatttactatgtatggcactccggtctccataattagctccttggctgcctccacattgacaaagcccaccggcacaccgattacaaatgcaggcttatatattcctttttctatcatatcgtacaactctataagcgctgtcggtgcatttcctatcgcaaaaatcacaggcttatctatccttgatgcaaactccatgcttactgccgcgcgcgttgtctttttctcctttgcaataagagcgacctcatcatcagccataaagcagtgcgcctgtccgccgaattttgccaaatattttttatttatgcctgaaagagccatgttggtatcagtcactatatctgctccctctgatatcagcctttttgcgatagcaacggcgtccttagagtatttaagagtctgtatataatcaaaatcagcactcgtgtgtatgactctttttgttatcatctcctgatcagcaggcagcgtaatctgcatttcagacagctcatgtgaaattatctcaaagctcctcttttcaatctccatcggctctaactgtttaatttttttcaatacactcacctatcactttcaataatcttacattttcatcataagtctttactgccacacgaaaatacccttccgaaagccccacatagttggagcagtcccgtatcagtattcccttattaatcagtatatcatataatggaagcttgctgtaaaacagtatgaaatcagcatcacttttatataccttaaagccaagcttttttagtccatctgacagcagccttctttgtccgctcacatacgatgccgtttctttaatatactctgattccctaatgcatgcctctcctgccatctgtgccaggacagacacgttccactccggcagattcctttgaaccttttgtcttactgtctcatttttactgagcatatatccaagccttactcccggaatagcaaaaagcttggtaaaggctcttacaacaatcagattgtcatagtcacataaaagtgacaaaacagaataatttttttcacaaaagcccatgaagcattcatctgccaccacataaatatgcttttctttgcaatgccctattatttgcttcatgaaagtgctgtctgcaagataccctgtcggattgtttggatttgcgataaaaaatatatctgtatcatctgtaagcatatccattaaagcatccagccgtgcagcaggagaaaaatcactctgctcatccagcaggaaatatccgatatcacagccgactgcacgaagcacatgctcataaccgaaaaagcccggggccagaagcactgctttttggggctttatggcatgagctatcgccataaaaagctctgaagctccgtttccgggaattacatcctcgctttgtatgctgcagccttgctgtgtgaaatactcggatattgcttttttaaggccactgcacgccatgtcgggatatctgtcttcatacgaaagtgcatcactcatagcctctttaacagaatgcggtatgccaagaggattgatatttaccgaaaaatccatatttactttattgttgtatatgtcaccgccatggatgcttttcattcaagtcctccatcaattcttccatattcaaagcaatattaaaacaagactcataaccgccacagataaaagctcacacaaaaacgcagtaatatacatcagcctgtttgcacgctttatatcctcgtactctatctcacgcaaaccgtctcctatgtattttttcttcacaagcttcccaaaatacactgcatcacccgccagctgcacccttaaagctcccgcacatacggactctgtctgggctgagttggggcttgcgtgattgaaacgatctcttttaaagatgcggtatgcatttttgccatcaaaatgcctgccaccgataaatgccgcagcaatcatcagatatgcactgattcttgccggtatgaaattgaccacatcatcaagccttgccgcaaatctgccaaaatacatatatttatcatttttgtatccaagcatcgaatccatcgtattcacagccttgtatacaaagccaagcaccggcccgccgattgccgtgtaaagcataggtgcaatcactccgtcagatgtattttcagctatcgtctcaactgccgcccttgtgacgcctgccgcatcaagcacagatgtatctctgccaacaatcatggaaacagcccttcttcctgcatcaactccatctgtccttagcgcatcgtacaccctcatgctctccacccgaagacactttgtggcaagaatctgccacgtcatgacagcctctgctattaccccggcatataaatttatactgtatgctgccacaataataattaccgacattgcaaaagttgcaaaaattacagtaaaagcaagatgcatgcctcttttatattttattaaatttaattttttttcagagatattatatccggcatcacaattaagcctcttatcgagaaaagaaatgagtgagccgataagcctgaccggatgcggtataaaatgcggatctcctattaataaatcaagcacaaagcctgctataaatgcaaaaatatgataacacatatgttagtccttcttaaataaatcatagcgatatgggcactatttcattaaacacaatctcattgccctcaaccgccacctcacacgagtaaccacagccgtttttcacctggtaatcatagtaatccatatcacagtaatggctcattatcgccatgatagtccctccatgcacaaaaaatactatttgtatctctttatcaggcatagccctcttaagctctaatgcctgtgtgagtgccctctcaaagccacatatacttcttttgcaaaactcttttctgctctctccgtttgaaaaggcaagtgttccaccactgtcaatccacgcctgatatgagtccctgaaacggatatctgtgctaagttccttatagctttttagctcccattcaccgaaatccatctctgcaaactcttttacggtatgaattttatggtgctgtgaaaccggcaaaataatctctgccgtctgtttgcaacgcctcattgggctggtaataattatctgctcctttaagctattttcctccaaagccttgtatacaccattatttagtgcatttttaagctcaaaaactccggcttcatcgagtggctcatctgttctgcccagatatctgtgttctctgtttgaggctgtgcagccgtgtcttataaaaatacagtttattttattttctgaccgattccacatattacgcgaactacctcgtctgctttttttgcaagcagtatctctgctctgcctgtctgctccctgtactctctctcaaacgcatcaagaggcactataccgtttccaatctcatcagcaatgactattgtatccggattttcctctgcaaattgcataaatttcaaaatatattcctgcagtggaagatttttctcaagcacagccctgataaaataatggaatttatcaattatgaatatccgctcatcatcaactgtaaaatcccacggccattccatgtttgatgccttatcattgcaggcattatcttttagaaaaaagcagtcatacacatcatatttttctgttttttctatcatattttcgagcacataatcaagctttccctgtgccactccgcctatcacaagcttcatattttctccaattccaaagtttaaaattcatagtacaacttttatcaaaattcttatccgtaccattcctatattcaaaacaaatatactaaataataaaagagacaccacccagagccactgccatggcgcactcacatatacacacaaaataccctgccgtatcccctgtgatgccgccaagctccttttttgttttcacataataataccaaaagctaagtgctgccacaataatcatggccaccgcataaggcagtgacacaataaataaaacagccatacacagtgcaagctggatgtatagtgctgccctgacaatcgttctgtgtgcagtgtccgcaaacataaataacagtccatcgctttttgccgatttaaatgacacaacagctattccgcttaagcatcttgcgatgaaaaaacctgcacaaaaaacaataaatgctttatcatttattatctgagaaaaagctcccatgaataataatccgtaggctgcaagcattataacggcaaacgctcctatatgtgaatccttaagtattgcaagcttttcctcccgcggtttgtatgaatgaaacgcatccattgtatccataaaaccatctatgtgaaagcctcccgtaaccgctatcggaatgagtgcgcctatgcatacatagcagatatccgccactccaaaatgagagtatatatatctccaaagtataagaagcagtccaatcacagctcctatccacggaaagaataccaacatgtacttcatgtcatcatcattccatttaaattgtggcataggtatctttgaatacatggaaaaagatgctatgcacgaccttattaacttcataatacacttaacctccacactgcttcacttaaccgtcaccggaatgcctgcaaccacctcaacgacacgctctgccatcgcagcaagccctctgtttacaattcccattgcctttatgtaattcatcgttgattcatcatagctgactccgtcttcaaatacattgtttgtcacaattacaagctcagcaacattttcacttaagatacttacctcttttaacacctttttactcacatggctgatttgagcagtctcataatccttcatattttcagggccatccaaagcctctttttcagcttcggtagcctgtataccggaagcatctacaggtggaaacatctcatttgccacaaggtttgacatacactcaagcagtgctgaccgcccggtttttaaacagttttcagattgcagcatagaaaccgcattttggatatcacgaggctgctcgatggtaataaatccttttccggcacgaagtcttctgtgcctgtctatcttccgctgcccctcatcatcaaatacctgcattgtggcaatgtaatatttttctttgtatcccttttcatttgacacgtgacaaatatacttttctgcatatgctgatttgccgctgccgctaccgcctgttataagtgtaatcatctatacgtacctctcatactgtgataccgagatatcgtcgaaggttgtccggcctttgtatacgctaagtgccatatccaaaagcgcaaacatcatcacggcacctgttccctctccaagcgcaagagatgctcttatgacaggccttacggaaagtgcctcacacaaaagcgccacggcaggctccctgccctcatgtgatggaatgataaaatcagtaactccagaaagaagcctttctgctgccaacgcagaaaccatgcttatcactccgtcgagcacaacaggaatatggtataatgcaccgcctatacatactccgacaagtcctgcaatatcgagtcctccgactgtcataagtatctcaaaggtgtccttattatataaattatacttttctattgcgctctcaattacacggatttttttctcaagcccactgtcgtttaggcctgctcctcttcctgtcactgtggccacatcgcaccttagcatggcggctgccattgccgcgctggtggtggtgtttcctatacccatctcaccggttgcaataattctgcagccgttttccttacacccacgcactatttctatacctgctgcaatcgcttcaagtgtctcagcctttgtcatggcaggctcttttgcaaagtttctcgtgcccctgcgcacctttctttgaagcagccctttaacactctcgtcactgtttattcctatatccacaggaattgtatcagcccctgcagtcattgccatgcgtccgacagatgaagccttccttgccatggattttgcaactgcaagtgtcacctcctgtccggactggctgatgccctcagcaaccacaccattatccgcacacatcattatgaccgccttttttgaaatatctatattttcatctcccaaaacagcgccgattttggccgttaaaaactcaaaatcacccatgccgtcgagcggctttgccacggaatcccagtttaaacggatttttttgtacatttttacatcaggtggcgttatttttaatttttttaattcttcaactgtaaaatggtcagaaataatattattttcaatcatatcttgcctcacgaagcatgccgtacactgcatccatatccagatactccctcagtgtatccgcaagcctgtcatactgtttttctttaaagctcttatagcttacaatagcactgtcactcacatcaatgccctttttatcggcaatataatccactatcactctggctgcctctgcagtatcaaaaatgccgtggatgtacgagccatacacatttctgccatcagatatgacattatttaactcatttttcctgtcatcacaagccccctgctcatctgaagctgtgctatatgcgctcttacccatatgtatctcatagcccagaaagtgacagcctgaaagcctgctcaatacaccatctacatgtgctatttcaccgcttgtctgaagccgtgtcttgctgtcttttagaacggtatctataggaagaagctccatgccacgcatatatccgccctcctcaacaccgtcagggtcggctattgaagccccaagcatctgatagcctccgcatattccaaaaacaggtatctcacaggagagctttttgacagctgcctcaagtccgttttgtctcatccacaaaagatcccccatcgtattcttgcttcctggcagaaatactatatccggatgacgcagctcatttactgttgacacataacgcacagtcacctcggacatctgctcaaagacgttgaaatccgtgaaatttgatattctcggatatctgatgaccactatatcaataagcccatctgtctttttgtcaaagcgctctgtcaggctgtcctcatcctcaagctgtacatccatatatggcaccactccggtaacaggcaccctgcctctctcctcaagcatctgtatccctgggtcaaggatcgtcttgtctccacggaatttattgataataagcccgcagacacgattcttttcctcatcggttaaaagcataagtgtgccaagcagctgcgcaaaaacaccacctctgtcgatatcacccacgagcagcaccggtgcatccaccatatgcgcaagccccatgtttacaatatcattttccttcagatttatctccgccgggcttccggcgccctcaatcactatgatatcagcatactcctcaagctttttaaacgccttttttatatccggtatgagagtttttttgtatgcaaaatactctctcgccggcatattcttaagcacccttccgtttacaatcacctgtgagcctgtgttatttgtgggctttaaaagaataggattcatgcacaccataggcttaatgcctgctgcctcagcctgcatcacctgagcccgtcccatctcaagtccttcgtctgttatataagagttgagcgccatgttctgtgatttaaacggtgccactctgtatccgtcctgtctgaaaatacggcacaagcccgcgacaagaaagctcttgcctgaattggacattgtaccctgtaccataattacctttgccatatctatacctgctgtctgaatttatgtggtagtctgttgctttatcatgaatattaaactgtagtgtgaacagtaacttccttaaagctgcgccaattgttcctccagaaaaggaatttttataatttttcctgtagagactgcatactcataaagcctgctgttaaactgctcatacgtgccaaactctgttctgtcacatataacgccctcgcatgcatcaataagctcctttgccttttcaataagggcatcgtctacaggctcaaagcttcttgcgctgacaatctcagcagaaagcgcctttgccgcaggataatccagatcattttcatagatgattcctgtcgcaaacgggataccctttcgctgtaagctcctaaagctttttctgcccaggccccctcctgctatgacaaataccctcgcccttccatccggtttttccagctctaaatcctctcctgtttcgtcaaagcttcctgccgtaattccaaaaagccctgaaacatattggtcagtaaatacctcctcgggagttccgtatctgtccacatatctgccatctatacacaaaatatggtctgacacacgctttgccatatcaagctcgtgaagcgacatgataaccgtaagattcttctgtcttttaagcctttggagtattgataaaaactcaagcttgtactttatatcaagatatgaggtaggttcgtctaacactataatctccggctgctggcatatagcccgtgacagcataacccgctgtctttgtccatcgcttatctttgtaaaatccttatcttttatctgtgatacattgaccagctccatcgcctcatccacagcctttttgtcctcatccgaaagtactccgaaccggcctgtgtatggatatctgccggtcgcaaccacatcatagcaggtcataagctccgtctttagcttatcggtgagcacaacagccattttctttgcaaattcattgccattcatcatcactacatcacttttatcaagatatatcgtaccgctcacaagcgaaagctgtcttgcaatactttttaaaatagtcgatttaccggcaccgtttggcccgattaatgtgagaatctctccccttttcagggaaaaatcaatattttcaataagcggcctgttatcatatccaacggccagcttttgagcagtaaaataatattccatcagacatttttctccttgctgcgtcttatcatgataaacagcactaccggtgcaccaaatactgccgtaaccgtgctgatactaagctccgtaggcgcaaacatcatcctcgcaagcaaatcacaaaacaggcagaacaccgctcccccaaggaagcaggccggtatcatatatataggctttgtgctctttagcatgctttttactatgtgtggcacggctattccgacaaacgatatcggtcccgcaaacgccactatacatgcggaaagcaggcttgaaagcagaaccagaagcacccgaatgcgctttatgtttacacccagatttacggcatatgactctccgagctgatatgccataagtggctttgacattataaaaacaaagataaatgtgattcccaccacaatgctcatcaccccaacgctgtcccatgtcatgcccgaaaagcttccccttgaccagttatgcaggtttactatgtccgaatcatctgcaaatgtcaccacaaactcagtcaccgcagagcatatgtagccaatcatgacaccgctcaccacaagcattgacatgctgcttacctttcttgaaatgataagcacaaagcccattgaaagcattgctccaaaaaacgctgctgcaatcatggctagtgagctcacacgtatagcatttccaagtaaaaataccataacaagtgccacaatcatcttagctcccgatgatatgccaagcacaaaaggtcccgcgattggattatgaaaaaaagtctgcaaaagatatcctgcaagcgctaacgccccacccagtatcatcgctgcgatagctcttggcatgcggatatcccacacaatacgtcctaccctgtctgagtggtcataaagtgtcgcaaatgcatccttaaatgatatgtgtacagttcctatacacacattcatgataagcaatatgataattaagattataagaataataaatgttgtaaaacaccttatttttctggttttttccatgttgtagctccgctttttatctttttgtgctattgattttcctgttgagcttaaacagatatttcatgccgctgtcgggtgcacctgtaatcatcgaatgcatatcatcaatcatatacccgatggacatagactgctgatacatatcgttcgtggtgcaaaatacattgccgtctttgactgccctaaaatcagcaagcaccgggcacttgtccaaaagctcattcagattcttcacaccgccgtctatcgcactgttatatatcagatagtcagcatctattgccccattgtagaaatcctctagctgcatattcatggttgacctgcctgtatcgtcgtcatttgatgcatcaaaaatatattttccgccggcaagcgaaatcatctttggcacataatctgtgcttttgcgcacctgaacctgtccattggacgtgatatagaaaaatgcaactgtcggtctgctatcagcatttgcagcagtatctgtctttgcgatgcgatttacaatatccacctgctcattaaagagctcatcggccttttcatcccggtctgtgagtgctccgaaaaacttcacccactccactcttccaagcggctcctcctcatagcttgagtactcgattattgaagggatatcaaagcttttaagcttttcagttacctgtggcgaatgggtaatcatagtattttctatggcaagagaacagttttctgacaccaaaagctcataatcgggctttgaatatttgcctgcatatagcatcctgccactttcaagagcctttcttgcactgtcaatgtaccagccatcactgtcaagccccgaaaatttaatagtgtccactgcatcaagcttgtcaaacatatccatcacccctgatgcgaccagatacaaatcacttacaggctccttcaatacaatgatatccttgtcaatatcctttggagtctttctgccctttggcacggtaagtattttggtaccatcctttgtagtaagtatcttgtatccaccctcataatagtcaacagaaaaattctttgcatataaaagcttcatactgctcttatatataagaccattttgtgcctctgcctcagccttcgattcggtattccctgaatcggaagaaggactgtcgcagcctgacagccagaacagtcctataattgatatcaatatatatataattatcttttttcttccatgcatagcttaattattctccatcctcaccaagcacctctgtagcagaatctgaatgaaaggtgagtgtgtactcaatctcgtgcggcttgctcatagcaactgtatctccgataacctgcataggtgtatcaagcttaaccggaatttcaaatacagaattgccgtctgtatttacaggcatgtatttctgtccgtcaactatcatatagtcatagtttggactgctccactgcactgttgcagtagcggctccaccgcttatagtcacctcagccggtgatgcaatgctcgccttaccgcttccgccctcgaaatcgagattgatattgtatgttccgtcaggaagctcttttcctgcactttcagatacgcttgcatctgcgtccgcaggtgtggcatttgagacctttaccttgtggtcataccatttgccctttgtaccgataagtgcaaggtcaaattcctcatccaaaacaggaaccggtatatcaaacgcattgacctcctcagttgtgccatcgccataatcgacagtctctacagttggctccaaaagctcagccttgtcctttgaggcatcctttgctgttcccaaaaagagatttacaatgtgtgtggatgtaagagcaacatgtattgttgccttgccatccttcacggtgagtgtacctttgttgtcatatgcatcattcacatgaaacattgagctgtctgtagtaaactctgctgtatatgtaccatctgaaagtgctatcttttctgttttttcagccttttttgtgctctctgtcgcgttctgcactgcttttttgctttctgtttcagcttttgcattcttattaccgcaggctgccaagctcatggcacaaaccagtgtcattgcaacgatataagtaaacttgtttctgaataattttctcatgtctgatatactgctcctgttattttatagcttccccactatacatttaagtaactgctacttgctcatggcagccgctgtatgctcaacataaagcttctggataccctcaatctcaccaagtccgttaatctgtgtatcgattttatcaaactttcctgatgccttaaactgtgaaagccatgaatcatcatcacttcctgccatatcattgttggcatggtctcctgcaacaaccataagcggacgaagaatgacgttcttgtagccagcggctgacaccttctcaatgacagactcacatgatgtatcctccggctcaccctctacagttccgataaatacgttctcataacccaaagctgtcatctggctctgcatctggctgtatgaaatctttgctgtatggcttgttccatgtcccataaatacaaatgctgtgccctcttcctttgcagcatcaaggctgtcatagcctgccttttctactgcttcctccgtaagaatttctgcaacggcctttttatcctcatttacaactgttgcatcacttccaacctcaccgaggagtggctctgcaatctttacagactcaaatttatccttatacttctctacagcctctgaaagctcatcatactctgcgccatgcatcaggtgtgtaggctgtaccacaagattctttacaccatttttgactgcacgctcaagtgcctgatccatattgtcaatcttctcgtcatctcttgcctgtacatgattgatgataatctgtgctgtgaaggctcttctgactgaccagtcaggatttgcagctgctattgcatcctccacacccttgatatcagccacacggctgtcgttgaaggatgtaccaaagcttactacaaggatctcgttctcgccgatatcatcctggtttctcggatcatcctttgaagcatcgcctgtatctctgccgaaatagtcaggatcagcattttctccctctacaagctccttctgtgcgtctgtgagcttgtcccaggcctccttagcctccttgcactgcttgtctgtatcatctgttctctcctgcacgtagattgcatcgattaaatctgccacatgcattgctgcctcctgatctgcgtttgcgcttgtctcactctctgaagccttagatgcctgtgtaccattctttgcatcatctgccttgcttccacagccggtcactgctgtcatagccataactgctgccatcagtactactactaatttctttttcatgttttctccttttcattctccttgcagctattaagctgcacatgttttaaatatgtaagacgaaaacatttaaagcgtcaaaaataaaagctctttgtactattatgtcaaagagctatacatgtcaaaatctttctaacccagactatacggctatcataaccttgtctgtaattataattatttcatcacgtacagccagttactcgtggcttgaaacactattgtttccgtacaacacaaaggcaggtctcccggcttatatatcattgcttcggccgtcttcccggttgcccagtgacctatcggccgtcactccttaattacggtgacgagttcgtacaggatttgcacctgtttcccttttcaccggagccagcttcacatcgcctgtcataaatcagattcaaatgcttgtctgctccgacacctttatgctacatattcagtttcttcgtgcgttgcttacgcaatcgcttggattattatattacaacttgtaacattattcaacagatttttatcagacgctttacagacacatttacaaaagcggtgcaaaaagctgcaaaatactctgcagcagcctgcctgcaaatgagatatcatttgtgctttcctcatacacctcctctgaaaccgcaaacgtctctatcgcatcctcttttatttttccgatgcactgagtcctgtacatgtatacaaaatcctcaaaattccaatacatgctcctgaaatccagattgcatgtgccaactatcgcagtatcatcatctgccactatacactttgaatgtataaagccgggtgtgtacagatatatccttacccccgcctcgataagaggtctgaaattggcttttgtctgcagataaatgagctttttatcgggaatctcaggtacaacaatacgcacatcaacacctgacctggctgccgatatcatagcatgtgacagctccgttccaagtatcagatatggtgtaaaaatataaacatattttttagctcttgagatgatactcacataaagattctctcctacatcatcatgctcaagtggagaatcgcaaaacggctggacaaaaccgctttcctctgacgggctgaaggtattgtgtggattcagaaattcatcatgtactgcattgtccttattgatataattccacatctcaaggaacatcgttgtgaaactgtttacacactctccctccacacggataccggcatccttccagtaaccaaacctgatttttttgttgatatactcatctgctatattgtaaccaccggtatgcgccacacgtccgtctatcaccagtatcttcctatgatccctgtcattcataattactgaaagcatgggcttatatggattgaagcgtctggtctgtattccgatgctctccatctcctttataaaatgtggcggaatggcatttatgctgccaaaatcatcatatatgattctcaccacaactccatgccttaccttttctttgagtatatcaagtatctgatcaagcataacgccactgccgattatgaaatactccataaagataaacttttcagctgaccttaaatcttttaaaatgctctcaaaagcctcctcacctgatttaaagtactctgtgcagtcctccgcatacagtggatatttctgattttgagtgataagcctgctttgtctgtatgcatccatatctgtctgtctgagagtctcatttagcagctcgttctcaggccgaagcggcgcatatgcttccacaattcttgccattcttttctgtgtcttcgacgtaagctccggtcttccgaaaaagaaatagcacggaataccaacgattggaacactcagtatcaaaaatatccatgacatttttatatacattttcatccgcctgttgacaatataaagcgaaagcaatatggctgccacatacagcagatcctgaaacaccctgctggcaacagatgccgtataaaataaaaagaaccaccatatcatctgtatgattattattgtcgaaactataaaaagctttgaaagcagtctttgtaatatttttctcatttaagccctaccacgaaattacaattatacaacctaatatttcctatattatctataataaatctctaatacatattataatattcccaccaatttatcaacatttataatcccccacgagcctttgtgactatctcctgccctgtcacatgtattatacagggctagcttaaccgcctccggtctcatatttggatttttttccaatagaagtgctatggcacctgacacaatcggtgtagccattgaagtacctgtttttcttacatatgtgccatctctcgttccaaggcttatgatatcatgcccgggagccagaatctcaggctttacaatacaacagtcggtaggacctttgccacttcttatatcatcaaagcttccgactgttattatttttcttgaaattcccggcacagttacagaaaacggtgccgggccgtagttgcccgctgctgcaacaactaccactcccatatcccacaattcatctatcagcttcaatatcttaatacgctctgctgtatcagaacatggcagatatcctacagagaagttgagtatttttatattaagtctgacgcagttttcttttatatacttaagtgcacgaattgaatccgatgtctgtcccatgccaagataatcaagcaccttaaacacatatagtcctgcccccggagccatgcctatatctgcagctgataatataccgcacacatgtgtaccatgcccattatcgtcataacatgtctcctttccacccacaaaatccataaagtgctttatgcacccatcaagctgtttgtgtttaaacacacctgtatcaagcactgctatattgacatttttaccactatatccatttttatataccagatttgcatttatactatatttcgcatttttcattattattttattttttaatttagtatatgattcgttttcacaatctgacacagctgcacctgttttgccttaactcaaacctcattaatataatttcatatattaaaaggactgcacctgcgtgcagccctttacttggatattattgttatactttaacgtatattaattaatcctcttttacatccttcatagagaagctgattcttcccatcttgtccttgccaaggcaaacaacctttaccttgtctccaagtgtgagtacatcctctactctgttgattctctcttttgcaatcttagaaatgtgaaccattccctctttgccaggagcaaattcgatgaaagcaccgaactccttgatgcttacaactgttccctcaaggatctgtccctgctcaaaatcagttgtgataatcttaatcatgtcgattgcctttgcaatcatctctttatctgttccgcaaactgaaacagcgccatcatctgtgatatcaatcttgacaccggttctgtcgataatctcgttgattgtcttacccttctgtccgacaacatcaccaatctttgatggatcgattgtaatctgctcaatctttggagcccactcatttacttcttttctaggctcagcgattgccttgctcatgacctcatccatgatgtagagacgtgcctcacgtgttctcgcgattgcctcctcaacgataggtcttgtaagtccgtgaatcttgatatccatctggatagctgtaatacccttatgtgtacctgttaccttgaaatccatatctccgaagaaatcctcaagaccctggatatctgtaagtacaaggaaatcatcatctgtatcgcctgttacaagtccgcatgagattccggcaaccatagccttaatcggaacacctgcagccataagtgacatacatgatgcacatgttgaagccattgatgtagagccgtttgactcaaatgtctcagatacggcacggatagtatatgggaactcctcaatgcttggaagtacaggaacaagtgccttctcagcaagtgctccgtgtccaatctcacgacgtcccggtccacgtgatacctttgtctctcctacagaatatgcagggaagttatagtgatgcatatatctctttgttgtgatattagcatcaagtccgtcgattttctgaatctctgataaaggagcaagtgttacaacatcacaaatctgtgtctgtccacgggtaaacattgcagagccgtgaactctaggaatcaaatcaacctctgctgcgagtggtctgatctggttgattgcacggccgtccggacgcttatgatcctttaaaatcatctttctgactgtcttcttctgatactggtaaatagcctcaccaagtactgcaaggtactcctcattgtcagcgaaggcttcctctaactgctctgtgatagctcttatattttcctcacgcttctgcttctcatctgtgaatactgcctcctccatctgctcaggagtaacaattttcttgatatcctcaaacatctgctccggaatagcacagctctcatactcatgctttggcttgccaatctcatcacggatctgatccataaatgcgataactgtctggttgatatcgtggcacttgtagattgcctcaatcatctgatcctcaggaatctcattggctcctgcttcaatcatgatgaccttttcctttgtagaagcaactgtgagctgtaaatcgccctcatcccactgcttctgtgaagggtttacgataaactctccatcaacaagtcccatctgtgtcatggcacatggtccgtcaaacggaatatctgatatatgaacagcaagagctgtaccgatcattgcaactatctcaggacggcactcaggatccactgacatgacaaggttgtttaatgtaacatcatttctgtaatcctttgggaaaagaggtctcataggacggtcaattacacgatctgtaaggatagcgttctcagatgcctttccctcacgcttgttaaaaccacccggaatttttcctacagagtacatcttctcctcgaactcaacgctgagtgggaagaaatccacaccgtcacgtggcttgtcagatgctgtagctgttgaaaggactgttgtatcaccatacttgataaaaacagctccgtttgcctgagctgctactcttccgatatctacagtaagagtcctgccggcaagttccattgaataacttttgtacatattaattctccttaaaattcttttgcagaagtgtattcctcttccgaaactactaaacaatacatgtacgctcatgcactctttagtggtctcggcttacttctgcttttcaaaaaacaataataaaaacaataatagagcggaataataattactccgctctaaagaaaatactattttctgagtcctaaacgctcgataagtgaacgatatctctcgatatcaatctccttaaggtatgcaagtaatccacgtctctgaccgatcatctttaacattcctcttcttgagtgatgatcctttgggttctgtttgaaatgctcagttaactctgcgattcttgctgaaagaattgcaatctgaacctctggtgaacctgtgtcatttggtgttctaccgtactctgcgataatagcctgtttcttttcctttgcgatcattgttgatcctccttatattataatgcgccctgataactgtatgatgctcagcaataggtcggagtgtccaactaccgaacatgggcaaaaccacacttatgcagtatagcatagtaagcatttgttgtaaactgtttttttattaatccggcaaatatcttgcgacacaaatcggatttctgtaatatgcatttgaaaccttgattccatcacgcttgttgctggcatgtacaatctgtccgtttccgatataaattgcaacatgtgagatactccttccacctccgtagaagaataaatctcccggctttgcttcagatgcactgatttttgtgccgtatgaaggctgtgctcttgatgaatgcggtaatgagattccatactttccaagaattctcattgtgaagcctgagcagtcaactcccttctcaaggcttgtaccaccccacacatatctgtttccgacaaactgtaacgcatacgatacaacagatgcccttacatctgatacgccgtcaccatacttcacctgctctattgtctttgctgtaggaagtgcctgtgccagtgtcacataatcctgtgatatatatcctaccgaatcatccacacttatctcaacccagccgtcagcgacagaattaaccgtgaatgcctctgaatttccaacctgcgaaagcaccgcagcctctgttgacttctctgcacgcacattcagtgtttccgtatttactgtggcaaccgtcttaatctcctgttctgcaatagcctctgcctcatctcctgtcacaagatactgcttgtttacatatcctgtcaccttgcctgatgtgaccttgtaccattctccggcatcctcaagaagctcacaggcattgtgattggtaagtattcctattacctcgctgtctgtcgaagcttcctgtctgatatttaagtttccgctgctgataaccgacataccaagatttgtgtaaccacaggtctgtgcggctgtcggtgtctgggatgcctcatttgcctgttctgtctcctgtgcagtattgccaacctgtgcaccctgagcagatgcagtaacaacattgctgtcgttttgcgctaccgatacgtcagctccataataagtaagagccgatgtaacccctgctgtgagaagctctgtggcatctgccgcctctgtcagaccaagggccacccccgcattgactgttctgttttcctttaatgatgttctggcatctactgtgctgcttgaactcatagatacagcacctataataatagcaaacgctacaacgcctgctgcctgtcctaattttaatttatttttcatatagcctccagttcatgctatccataatcccatgtttacgagtatatcacaaattgttaaaatgtcaatatttctccgtaatatttccgtaatatttgtcattttttcgttattttgggtaatttcgcaaaaaaacagccacactagaatgtgtgactgcctgcataattgattgtataattgatatctgcactcatctggctctttaacgcttctattgaatcaaacttcatctcaggtcttacgaacttatgaagctctaccatgatatcctgtccgtaaacatcctgcccaaaatctatgatatatgtctctgcaccgattggatttttgccctctatagtaggcttgcatcctatattggttacaccaaggtaccagttgtccctgacaagaactcttgacatatacactccctttggtggaagcagcttatcgtgcggcactgaaaggttgactgtcggaatgccaatagtcctgcccagtgctctgccatgcactactcttccttttatgaaaaagggatatcccagcagttcattcgcctttttaatatgtcctgccgcaatctcctcgcggatataggtactgcttatatccctgtctccatcctttatcttgtccaccacaataagctcgtatccaagctctcctgccatcgcagaaagcagccgatggtctcctgccctgttgtgcccgaaacggaaatcatctccgacaatgatacacttgacattaagacttttaactatccatctgacaaacgcatccgcctccatcgtcatcacctgtggcacaaacggacactctatcagatagtcaatacctgatttttcaaacacatactctttttcatcgtttgtgattataacctttgactcaacgccaagtacctccgatttgggaggaatgtcaaacgtaaatatgatgcgcttgtagccatgcagattgctctgttcaatttgcttttccatcagaaattcatgtcctctatgaagcccgtcaaactttccaaacgagatgacggacggctccttgacatgaaaatccagagttttgcttatatattccataatatctgtatactattctattccataaaaatcttaaccggcttaaactcaccggtctcatcaagatacgaatacacaccgacaaatatgccctcatgattgtatactctgtatcttatatcagagtcagcactgtgttttaaataatccgtaagcactgccggaattttatttccatttctgacaagcttatcagcatctgaagcagtatgcactgccggcagattttcgaatactccgtcaacaggcatcaccatatcaaagcagccttcatccacctttgactgaatctgcgaaagtgtaagtgcatgctctaagtcaaagcctgctacccttactctaagcagtgacttcatgcagccatggcagcccagcctctctccgatgtcattgcacagcgtcctgatatatgtgccctttgaacagtgcaccgtcatcgtaacctcaggcaaatcaatgctttcaaccttgatatcaaacacctcgatatcccgggcttttctctctataaccttgccctccctggcaagctcatagagctttttcccattgacctttagagccgaatacattggcggcacctgcttttgtctgccaataaactgtgatattgcatcatacaccgcctgctcagtcacattgacctcagcctgatttaagacctgccctgaaatatcctgtgtatctgtctcctgtcctaaaagcagcacagctttatagaccttgtccttatctgtcaaaaggtcacacactctggttgcctttccaaggcagacaggaaggacgccttgcgcatcaggatcaagtgtacccgtatgaccaatcttcttctggtggaatatgcctcgaagctttgccacaacgtcaaagcttgtatagcccttttccttgtatacattgattattccattaaccatctgcccaagaatctctccctaaatattgtccttaattgccgtaagaatgcggtctgttgccacctcaagcggtccgtcaatcgtaaatccggcggcctttacatgtccaccgccgccaaataccgacgcaacctttgccacatcataatcaccgtttacacgcaggctgcccttgtaggtaccatcctcattttcatagagaaatacagcaacctttatatcctttgtcacacgcagctgatttacaatgccgtcgagatgctttggaagcacatcgtacttctccatctcagcgcgcgatactgcagacaatataacatcaccattcagatacaaagcagcattcaaaagcgcctgccccataatcttgttctgagcaaatgtctttgtataaaatgtatcatcgattatccttgaataatcaatgcccatctccatcagggagcctgctatatccatagtcttttttgaagtgcatgaatactggaacacgcctgtatcatgcaccatgcctgtgtaaatacactctgctatctgtattgtgatgcgctccttcggcagaagttcaaacacaagctcacaggttgagctcgcatccggaaagatgtaatttgcgtctgcaaaggccccgtttgtaacatgatgatctatacaaagtgtcctttttgcagactcaaaatacttagctgcacttcccagtctgcctgtgtcactgcagtcacatgctatgaacagatcgtatactgtatcatccgcatagctgctgtcaatctcatctgctctttgcataaacttaaagatgtttgggcttggctctaaataaagccttgcctttatatcaggataataatcctttatgtagttgtataccgcaagtgttgagccgacacagtcgccgtccggtctcacatgaccggaaacggcaactgattgtgcatcctttaaaatagaatcaatctctgtcataatcaatcctctttgagattttttgttacttcatcaatctttttagacatctcaacaccatactctatagactggtctatgataaatgtaatggcaggtgtatttcttaaattgatgttctttgcgagagttctgcgtatatatccctccgctgacttaagtcctgcaagtgtatcagcctgtgatttcttgtcaccaagcacactgatataagcctttgctgtctttaaatcaggtgccacctcgacagcaacaacacttgtcatgggattgatacgcggatcctttatctcaccgcgtatgatatttgacagttcacgcattacctcttcgttgatacgaatattttttatgctgttctttctcatataatcccgctttctttttatattaaaccgtaactatccgaatagctgcattaattcaagataaccaatatatgattatctcggaacctctaccatcttgtaagcttcaactatatcgaattcctgaatatcattaaatccgtcaaatacaagaccacactcatagcctgtcttgacctccttgacgtcatccttgaatctcttgagtgaagcaaggtctccctcgaatatctgctcaccctctctgctaattctgacacggcagcctctctccataaatccgtcaagcacatatgaacctgcaatgtttccaacgcctgaagccttgaaaatctgtctgatttccgcatgtccgataaccttctcctcaaatacaggatcaagcatacccttcatggcagcagatacatcctcgattgcattgtagatgaccttgtaaagtctgatatctacgccctcacggtctgctgtagccttggcaacaggatccggtctgacgttaaagccaatgatgattgcatttgatgctgatgcaaggataacatctgactcgttgatggcaccaacgccgccatggatgaccttgaccacaacctcctcatttgaaagcttgacaagactctgcttaacagcctcaactgaaccctgtacatctgcctttacgatgatatcaagctccttcatgttgcctgactgaatctgtgagaacagatcatcaagtgacatctttgcctttgtatcctcaatgagcttattcttttcctctgaaatatatgtgtcagagaatgcctttgcctccttctctgaatcacatgccacaaatgtctctcctgctgaaggcacactgttgagtccaagtatctctacaggtgtagaaggcttagcctcctttactctgcggcccttgtcatcaatcatggctcttaccttaccatagctgcttccacatgcgattggatctccgacatggagtgttcctttttgtacaagcactgtggcaaccgcaccacggcctttatcaagctgtgcttcaattacgagacctcttgcgtttctatcaggattagccttgagctcgagcacctctgctgtgagaagaatcatctcaaggagattgtcgataccctccttagtatgtgcagatacaggacagaatattgtgcttccgccccaatcctccgggataagctcatactctgagagctcctgcttaaccttgtcgatattggcacttggcttatctatcttgttgactgcaacgataatctcaacacctgctgcctttgcatggtttattgcctcaacagtctgcggcattacaccatcatctgcagcaacaacaaggattgcgatatcagtagagtttgcaccacgcatacgcattgctgtaaatgcctcatgtcccggtgtatcaaggaatgtgatgttctggccattgattgatacaacagatgcaccaatgtgctgtgtaataccacctgcctcacggtctgtaacacgtgtctgtctgatggcatcaagcagtgatgtcttaccatgatctacgtgacccattacgcagactacaggtggacgaggaaccatcttgctctcatcctcttcatcctccttgagaagctctgcaatcacatcgaccttctcctcttcctcacatatgaaattgaactctaaagcaatctcctcagcagctgcaaaatcaacctcagagttaactgttaccatctcgcccttcatgaaaagcttctttacaatggctgaaggctgaaccttcatcttatcagctaaatcccttattgtaatcttctccggaagagaaattgtcttaatctcgttctcatcctcttttggctgtgccttcggctgctgtggctttttcttaccgccgtgcttctcgagattgatgtaattctcctgcttctttccgagcttatcctgcttctggctctgattgtgattatgcttattctttctatcgttgcctctgtcgcggctctcctttcctcttacatcatcaggagctgcaactgcaactgtttcttttctgaaacgatttctgtcatcacctctgctgcctgttctatcgttatttctgtcattgctcctgcttctgtcattgcttctgcttctgtcattatttctgtcaaagcttctgccaccctctgcaggacgtctggcgtcatttctgaagcctcggttattgtctctattattgtctctgctgttatctcggttattgttgtcgcgattgtttgttcttctatcgctgtttctgtccgtatttctgcttctgtcggcatttctgtcagtgtttctgttgttgattctctcgccattgtcctgacgtctgtcgcttcttctatcagcgtcagcctgacgtgccggatgcgaattggctgccttcatatctgcatacggatccgctgtacgctcacttatagggcgcatagctctctctccgacaggtcttggcttaataatgctgtgctgctcaggacgtgatgactgattatcgcgtcttccattgccattcctgcgctgcgaactgttatttccattatttccgctgccgtttccaccatttgttttcctaccctgcttactgtactgggcattgaaaactgctgtgatgcttgcctttttctttggtctgtcggctgccttagcctcatcctttttaggttcttccttcttaggtgcatctttttttgcttctgtttttgcgtacttctttcgtacaatttgctgtgcctcatcctcaagaccgctctgcacatttttgacagcaaactgtgtgccgtttaatgtgtctatgacttcctgcgactttatatttaattcttttgcaagttcatgaactctcatttttgccatatatctattttcctccattattcagttttattcgactgcagcttttttatcactgcatttgcaaggttttcatccgttactgcaagggaagcgcgaaactctttgcctattgcattccctaaccccaccttgtcactataaaaataaatcggaacctcatagaaagcagtcatatccgaaaaatgcttctttgtgttgtctgatgaatcatctgcaactatcactaaaaatgcctttcctgtctttacagctttctctgtagaaaactctccgctaaccacattgcctgactttgctgctaatcccagcatagaaagtactctatctgtcaatttggttcatctccttttcaagctcctcatatacctgttctgatacactaacaccaagggaacgctcaagtgcctttgtctttttagcctttttaaagcattcaaggatcttacatatataagctcccctgccatttttcttgccggtgtcatcgagaattatgtcgccctccgcagtctttaccacgcgaataagtgacttcttttccttcatctcctgacagcctacgcatttgcgcattggaatctttttatttgccattactgctcatcaccactatctgctgcttcgttctcgtcagcctctgtatctaaagcctctgtctgtacatctgcctgttctgtatcagctaatctctcgttctcagcaagctcctcatccgaataatcataatcgtcatcataatcatcctcttcatagtcattctcataatccatgaagtcccctgactctctggcctgtgtctcgctcttgatatcaatcttgaagcctgtaagtcttgctgccagtcttgcattctgtccttccttaccgattgcaagtgaaagctgataatccggaacaacaacctttgctgatttctcatctgcatctgcgataacagagataacctttgcagggctaagtgcgttctggataagtattgccggattctcatcccatgtgatgatatcgattttctcaccgcgaagctcatttacgatagcatttactctggcaccattcatacctacacatgctcctacagggtctacgtttggatcatttgaccatactgcaatctttgttctgcttccggcctcacgtgaaatagcctttatctcaactatgccctctttaacctctgtaacctctgactcgaaaagtctcttcacaagctcaggatgtgttcttgaaacaagaatctttggtccctttgatgtggacttaacctcaaggatatataccttgatacgctctgtaggcttgaatacctcaccctttatctgctcactctcagtcaaaagtgcatctgccttacctaagttgatgctgacattctttccgatgtatctttgaacaacacctgtcacaacatccttttccttgctgttgtactcgtcaaatattacctttctctcctcctcgcggattttctgaaggatgacattctttgcgttctgtgtagcgatacgtccgaattcctttgacttaacctcaactctcacgatatctccaagctgatagttaccgtttaccttgtgcgcatctgctaaggaaatctcctcaaccggatcctcaaccgtatctacaaccgtcttctcctggtagcatgagaaagcacatgtctcaggatctatttctacctttacattgtctgatttaccaaaatggttcttgcaggcagtcacaagagagttctcaattgcctcaagtaaagtttctttactgatgtttttctcctgctctaatatatttaacgcttctaataactcattgctcattattttttcctcctatttgtgttatcgtgcgctttaattaaaaatccaatgcctgacgtataagcgcaatgtcactcttattgaatgtagtctcattgccgtcttcatcggttattgtcactgtatccttatcataggctttaagcagaccataaaattcctttgatttgttgatagccctgtatgtgcgaatctctatctccttattcatattgcgcacatagtccttttccttcttgagaggtcttccaagccccggcgagctgacctcgaaggtgtacgaatcaggaatatagtcctctctgtcgagaatctcattcatctgccttgcaaccacttcacagtcatcaacagttatgccaccctccttatcgatatatgctctcaggtagttcatgccgccttccttaacatactcgacatcaacaagctcaaaattcatgctgtcaagaattggttgtataaagctctctgtctttgcctcatatacacttgcctttgacattttatcacctctcttttttacatttgtaactattcagaattgttccaagtggttctgaatagctgcctgatgtttataaacgtgaattgagagaggacttttgccctctctcaatctagtcaacgttgttatcataggtataatagcactatcagaaaaaaaaatcaagtttttttaaaaaagtacttgctttttttgaaactccatgatagtataatacacggttcgttggtcaagcggttaagacgccgccctctcacggcggaaacacgggttcgattcccgtacggactgctcactgatatttatttaattaaatacagcccaacccgaaagcatcgcatttatgcgatgtttttttattgttgttgacacctgacgcacccgtagcagtaaaatacaccttgcatgcgctaacgctacgctgtcaagatactgtacgaattatgcttcacaaatagaaatgccccaccatggacggtggggcaaggcgttacgcgccacggacggcgcgtaaaagccggtttcgtcattttgtgaaactctatatgcataattcatacagcatcttaactgcaaagcgttagcgcatgcgaggtattgcgtgtcacagagtgtactccgggctccaatatttctgataattaatcatcatatccgttaggattgttcttctgccatctccatgagtcggcacacatctccttaataccatactgtgcttcccagccgagctctctcttggcttttgatgggtcacagtagcatgtagcaatatcgccaggtcttctaggctttattgtataaggaatcttaacacctgttgcagcctcgaaattctttacgatatcaagcacgctgtagccatgtcctgttccaagattgtagatgcaaagacctgcattctcctcaattttctttaaagctttgacatgtccaaccgcaaggtcaactacatggatgtaatctctcacacctgttccgtcaggagtatcatagtcatctccgaatactccaagctctttgagcttgcctactgccacctgtgtgatataaggcatgaggttgtttggaataccgtttggattctcacccattgtaccactcttatgagctccgattggattgaagtaacgaagaagaataacgttccactcattatctgccttatagatgtccataagtatctgctcaagcatagactttgtccagccatatgggtttgtacactgtccctttggacactcctctgtgataggaatctgtgcaggatctccgtatactgtagctgatgaagagaaaatgatgctcttgcagccattctgtctcatcacatcaacaagtgtaagtgttcctgcaatattattgttatagtactcccaaggctttgccacagactctcctactgctttgagtcctgcaaagtgaatacagctatctatcttttcttccttaaaaatcttatttaagatgtctctgtcaaggatatctcccttatagaactttacttctttgcctgtaagagccttaactctgtcaagtgacttctcagaagaatttgaaagattgtcaagtactacaacatcgtagcctgcatcaagaagctccacacatgtgtggcttccgatatatccggctccaccagtaactaaaattgccataataaatatctccttttcatttttgttaaatttattgtagcgcatttgctcatttttgtatagaataaaatgtagaagaaatatgtaaaaatgttgtaaaggtaggcaatatgaataataaatacaaaaattcctatatcgtaaaagaaaaagagcttgtatctctgtccgtatataacgtaggcttccagagctgtgatagcctgtatcagtggggccccggtatcagagaccattatctgattcactatatcataagcggtaaaggccgctacactgtaaatggcagtgttcacacattaactcccggtgatgcgtttctcgtatatccaaataccgaagtgatttatcaggctgatgcgcaagatccttgggaatatacctgggtaggctttaccggcagcgatgctgcaaccattttaagagccactgatttcacaaaagcgcatccatacatacacagtgtatcaaacggaaacgaaatcaaaagacagctcatgcatatatacgacgccagaggcacagaatttgaaaatgcactcgaaatgaccgggcgactctacaccaccctcgctctttttgtcagtgccgccacatcaaagccgccgcaaaacagtgcaaactcctatgtacaaaagggcatcgaatacatctccgccaactattcataccctatcaccgttgaggatattgcatcatatataggcttaagccgaagtcacctgttccgttccttccagagcatcctcggtgtatcgccaaaggaatatctgaccgatttcagaatcaaacaggcatgctatctgcttaaacactcctcattgtccatcacagcaattgcaggctctatagggtttgataacagcctttatttttcaaagacctttcataaaataaaaggcctttcgcctaaggagtatcgcagtaaatacaaaaaagctcaagaataaaaaaaagctaccgggcttcacatgaagcccggcagctttttcatatatctctttatgctaaactaagcaagcttagatttagcaacctctactaatttagcaaatcctgctgcatctgtaacagccatatcagctaataccttacggttaaggtcaacgtttgctaactttaagccgtgcatgaactggctgtatgaaagtccgttgagacgagctgctgcgttgatacgagcaatccataactgacggaactgtctctttctctctttacgtccagcgtatgagcttgtaagtgctctcataactgactgctttgctactctatactgcttagatctagcgcctctataaccctttgctaactttaatgttctgttatgtcttttcttagcgcctaaaccgcctttaactcttgccatttgttgattcctccttaactaatactaccgattacatgtatggtaaaatcttcttcatattcttaacatttgtctcatctgtcattgttgcttttctgagatttctctttgtctttgttgttttcttagttaagatatgtctcttgtaggctttatttctttttaactttcctgttcctgtaactttgaaacgttttgcagctgctctgcttgttttcatttttggcattgtgtgttcctccttaaattgttatctcttttctgccagcaccataccgatgcttcttccttcaacctttggtgctttctccactaccgctacatctgaaagattctccgctatatcatcaaggatatgtttgcttgcattcatatgagccatctcacgtcctctgaatctgagtgtgatctttaccttatttccttttgcaagaaatttctttgcagcattcatcttggtattcaagtcgttagcctcaatgttaggtgagagacgaatctctttcaattcaacggtcttctgctttttctttgcatccttttccttacgggcctgctcataacgatacttaccatagtcaatcaccttacatacaggtggctttgcatttggtgctatctttactaaatcaagtcctgcctcgtctgcaatcttttgagcttctcttgaagaaacaattcctaactgctctccatccgctccaatcagtcgaacttctctgtctctgatctgttcattaatcattaattcgctaatggtcttgtacctccataaaaaatagtggataggcagactatccactatacaatcttcaacacaaatgtttgaaaatattaacgctaagtcgcgccattgcgcttaggtgagagtggatactctactttgttttcatacaactactagaatatagcacagacaatttctgttgtcaacacttttatctaaatttctataatctaatatgtaccaagaatcttaagggcaattgcctcttcccttatgcctcttaacgcattctgcaccgctgtatctgtaaaacgtccttcaaaatcaacaaagaacctgtactcccacgccttatcagatatcggacgagactggatatttaacatattgattccattgtatataaagtgtgccagcatatgatatagtgcaccactcttgtgaggtgtctcaaagcatatgcttatcctgtccgcatctctgcggcatacccttttagccgacacaattataaaccttgttgcattgtttttattgttctgtatgcggctctcaagcacctgaagcccgtatatatcagccgagatatggctagctatgccagcctgtgtgatatctccgtcatcctttaccttctttgcagaaaaagctgtattcctgacagccacctggttaatatccttatgctcatcaaaaaaatctgagcactgcataagcgcctgtggatgtgaatacacagtccttatatcagaaatctttgcacccggaagtcccatcagactgtggtcgatgcgtataatctgctccccaactatataattgtcgtattcaacaagcagatcatagttttccgatacaataccggctgaagaattctctatcggaagcactgcataatcagcctttccgcatttgatatcctccatggcatccttccaggaatccacgttgtagccattacaattctcgccaaagtatgtcttcatggcaagctgtgagtatgcaccctcaactccctgaaacacaatccttgcattggaaaaatccaggctgtctacctcagtaaagttttccttctccactatgccatgctcagtcataagctgatactgcttctttctactggtcgacataatctgttcaaaaagctcaactataccgtgcttcaaaaactcatcatctgcaagagacgataatttctcaagcttttcgtcctccctcgccttgtcaaagacctttttgccggtggttatcttatactcggcaacgtgctttgagatatccattctttccttatataatctgactatttcactgtctatctcatcgatagactctctcaatttcattaaatcttccattattgtctcctaaaaaagatataataaaatattattacaaaatttatagaaaggcaagtaatccttgaaagatttatcatatatagatataatttagttaatatctatatatgataaatcttatataccctcgggagaattacatgaaaaaatatctaaaaataattattccactaattttaatatgtatcacaggccttgttatatatcattttgtatcaaaggtaaagcttaattcatcctatgtaaatggtaatactgcaggtaatctgtacaatgccgggctcttctgtgaaagtgacggtgaagtatttttctcaaatacaaacgacaacggcaggctgtatgccatgaatattgacggcagcaatatacataaactgagcaatgacacagccatgtacataaacgcagataaaaactatgtctattacgtgagaaacaacaatcagaaaatcacaagtcagaccttcttttcatatgacaggaacagcctctgccgcataaaaagaaatggccacggctccaccgtgctggatcctgacccatgcatctatgcatccctgataggcaactacatatattatctgcactatgacacacaaacagctacctctctataccgcatcagaatagatggagaagaaaaaaagaaaataaaaaatcactatctgtttacctgcaacacatcagaccggtatttttattataataatccaaaaaacggacagctatacagatatgacactgcttcacagagtgaagccttattctacgactgcaactgctacaagccggttgtgctggatgacacaaatgtatactacatggatgtaaatcgtgacaatgcgattgtccatgtcaatatcaacaatccaaatcctgtagttttaacggaggccaatattgagcattacaatgtatatggcagtctgatattctatcagcgcggtggtgataatccggcactgtgtgttgtaaaaaatgacggcaccggctttaaagagcttgctaagggtgagttttgcaacataaacgtaacatcacagtatgtgtatttcacagattttgtctcgaacaaagagtactgtacatccacacagaatccggatacaataaaggctttacagccataacagataatttcattaaaaagaacacgcatgattaatcaactcatgcgtgttttttattaattcatataaaattcaaatcttgatctgtatatatcactgcactttccggtattctggtctatcgcaataacagaaagcacattatttccctcaggaacaggtattggagctgtatactctgttgatgcagcactcggatctgacgaatcccaggtatagtataccttgcaattttcaggtactgtgattgtaatgtctgtctgtgcaccaaatgtacctccgtcagggtctatctccggtgcatccggtgcctcaaactcgatttcatacttggcagatgccacctcgcttttgattcctctgtcatcaaccgcaacagctgttatctcatatgtgccttccttgtccagggtgatcgggctataatatctttctcctctggtcaaaggatcatccgaatcatatgaatagtatattttggtatcgctgtctgcatctatagaaagctcaatagtctctccatacttgccactgctcttgctaaactgcggtttagatacagtataatccgcaaaaagctttaaaacagatgcatccttagcactctcacgcagcgcaacaattgcatcataatccttttttgattcataaatcgagataagctgcttataagcctctttgctctttggatcaatattgataatttcctgatacagcacaagagcggcatcataatccttcttcgacatatatatatcagccaaagcaaatctgacatctgtattatccgaatcaatcgacaaagccttctcataataagaaaccgcggaatttatatttcccgccgaataagctgcctttgcctgcttcacctgataatcaaatgaattgtcatgtgatctgcttacattacgtgtaatagctgcaataagtattacaattgctacagcgcacactacagctgatataataattatcttcttctgctgcgctctctttgccctctgtccgtcagactgcggcttctcacacggttgtttcgtctgagactgctgctcacctgtctgagcctgtctcacttgctgctttacagactgtgacattctgtccgttttttgtccgttccactgaccggcactatgaagctgttccctcaccggctcatcaaacctgattgtcctatcagacacgggctttacagtcttttgtccatcagttcgcctgtcatcatttccaaccagattatcaagataatcatcaaattcgttgtaatcaggcactatctgaaccggatgcccacagacatcacagtacagactgcccgccttcaattcattaccacaattggcacatctcatacatctaatcctcttacttattgtctaattatctaattatctcttcatagcctcaacacaattgctcatgagcatcgcaattgtcataggacctacaccgcccggtacaggtgtgatatgtgacgctttagacacaacagaatcaaaatccacatcaccacacagcttattttcagcatttctgtggattccaacatcaatgacaaccgcaccatccttcacatatgaagcatctataaacttaggctttcctattgccactataagtatatcagcatttttacatacatcttttaaatcctttgtatgtgaatgacataccgtaacagttgcattctccctaagcatgagaagtgacataggcttgccgactatattacttctgccaaccacaacacagcttttaccatcaatatctatattgcttctctttaaaagctgaatgataccggccggagtacacggcaaaaaaccaggctttcctataaccatcgctccaacactctgtggactgaagccatcaacatcctttttgggatcaatagcatcaataaccttgtcctcatcgatatgctttggcagtggaagctgacagagaataccatttacagaagaatcagcattgagcttttcgataagttttaatatctcatcctccgtagtctcctctgcaagttcatacgaaagcgatttgattccgacatactcacatgcctttttcttgttgcgaacatacactgatgatgcagggtcatttccaacctgaatcaccgcaaggcagccctcgataccttttttcttaagctctgtcacttcttccttaagctcatccttaatctgtgttgaaattaattttccgtctattagattagccatatttcctcctagaataatcctgtgatcacaccattgttatccacatcaatgccgtatgcagccggcttctttgaaagtcccggcatagtcataatagaaccgtttactgctacaacaaagcctgcacctgctgacgcataaacctcacgtacgttgattttaaagccgctcggtctgccaagcttctttgcatcatcagaaagcgaatactgtgtctttgccatacatacagggaaatctcccattccaaggtctgtaattctcttaagttctctctctgctgccggagaatatgtaacaccatctgctccatatatttcttttgcaacagtttcaatcttttccttaagtgacaggctatcatcatagagcaccttaaaattgctttccttgtgctcgattgtttcaagtaccttgttggcaaggtcaattccgccttcgccacccttctcccatacctctgagagtgcaaattcacagcctctttctttacagaactgctctacaaaatcagtctcagcctttgtatctgtgacaaatgaatttaatgtgacaactacaggcactccaaacttgtgaagattctcaatatgcttctcaagatttacgattccagccttaagtgcatcaagattctctgatgaaagctcatccttcggcacgccgccattatattttaatgctctgattgttgcaacaagtacaactgcatccggcttaagccctgccatacggcacttgatatcaaagaacttctctgcgccaaggtctgcgccaaagcctgcctcagtgataacatagtctgcaagctttaatgctgtctttgtggcacggacactgttacatccgtgtgctatattggcaaaaggtccaccgtgaactattgccggtgtatgctcaagtgtctgaataaggttcggctttaaggcatcctttaagagagctgccatagagcctgtagcctgaagatcatcggctgtgacaggctttccgtcaaaggtatatgccacaataattcttccaagtcgcttctttaaatctgccatatcatcggccaggcagagtattgccataatttcagatgctacagtgatgacaaaatgatcttctctgaccattccgtccatcttgcttccaagaccaacaacgatatttctaaggacacggtcattcatatccatacatctcttccatacaatctggcgtgggtcgatgccaagctcgttgccctgctggatatggttgtcaagaagtgctgcaagcagattgttcgcagatgtaattgcatgaaaatctcctgtaaaatgaagatttaaatcctccattgggacaacctgtgcatatccgccaccggctgctcctcccttgataccaaagcaaggtccaagtgacggctcacgaagtgcgataagtgctttctttcccaggcgtccaaatgcctctccaagaccgacgcttgtggttgtctttccctctcctgcaggagtcgggtttatagctgtaacaagtatgagctttccgtcaggatttttctttgtgcgattgatgagctcatcagaaatctttgccttatactttccataaagctctaagtcatcctctttaatccctatagatgctgctacatccttgattggaagcattgtagcttcctgtgcgatctgaatatctgttttcatttttctttgctcctttgtgttaattattctctaatatagtatctaattcctctttagtcaccagaaccttgcggggctttgtcccctcctcaggtcccactacaccggcctcttcgagctgatccatgatgcgggccgccctgttgaagccaattttaaggtatctttgaagcattccgattgaagcccgttccttatctgtgataattgacgctgcctccgcaaagtaagagtccctgccatcatccgtgttttccacatctgaaatggtaacggttgtatttgtcgtatcattcgacaggctctccatcttttgtgccacatcattactgtactgtgcattctcattattttcaataataaatttcacaatatcggaaacttctttatctgaaacgaatgcgccctgtactcgaaggggcttcggaaccccctgtgggtcaaataacatatctccctttccaaggagcttttccgcaccattcatatcaagtatggtacgactgtcaacaccgcttgtaaccgcaaatgcgatacggcttggcatattcgccttgatgagacctgtaataacattaacagaaggcctctgtgtagctataatcagatgtataccggctgctctcgcaagctgtgccagcctgcatattgcctcctctacatcctttgatgcaaccatcataagatctgcaagctcgtccactataatgacaatctgtggcatctttggcggtttttctgtatccttgccatccattgcatcaatcatggcattgtaaccgtttatttccctgacaccgctgtttgcaaacttctcgtatcggtctgtcatctctgaaaccgcccagtttaatgctcctgcagcttttttaggatctgtaacaaccggaatcatcagatgaggtatgccattgtatacactaagctcaaccaccttcgggtcaatcataatcagctttacctcatccggctttgccttgtatagtatactcatgataattgtattgatacaaactgacttacctgagccggtagcgcctgcaattaaaagatgtggcatttttgcgatatccgtaaccttaaccttgcctgcaatatcttttcccactgcaaaggtaatctttgatttggcatttttaaattcttcagactccacaagctccctgaaggaaacagcaacactctggctgtttggcacttcgatgcccacagcggcttttcccggaataggagcctcgattcgtatatccgcggctgccagattaagctttatatcatctgccagattcacaatctttgataccttcactccaagctccggtgtgatttcaaaccttgtaacagcaggaccgcagcttatattattcaccttcgcattcaccccaaacacattaagagtctgttcaagctttgccgccgtctcacgcagatgagcctgcgaatcaccggttttacccctgtcaggagccttaagcagatcaacagtcggaaatacatacggcttctgctggattgcattttctgcgtcatttaccgctatctgctcgctgactttttcaacctctttggcgagctcatctttgtctgatttgacatttttcttacctggctctgctgcaggtggttttgtcattaccgcatctgcagccggagctgataattttgattgcagctcattatctttttgtatgccaaaatcatcagatatatcaggctccacgcagcccgatataggtatctgcgacacatggcttgcagctgctgcgcctgagccgtccggtttcattccattaatctgctgcagggtctttctgccaagctcatctgtactatcactatcggctgttccacccaaagccgaaacaggctccgatgccacaccaaagtccggtgtctgcactatttcccctgcatcccctgatgtaaggcttgtcgtctttttctcctttattgcaggtgaactcggataattctctatagttatctcaccaagcgcatctgtagcagctgcaccttgtccaaatatccccacatgcgctgtatcactacctgccatgcctgaatccagcacgttttcactgccatcaatttttgtatcaagtgacacgcctgttatcttattgtccatccttcggccggcacgcttactccttctgccaccttttgcagcctcctttatgtcactgtctgtatcatctgaagctaaaccctctcttgtctgacgctctcttgacttatactgccgatactcctgatatctctcattattctcacgcgctgactcgtatacctttcgtccgccgtttctcatacccttcataaatgatttaccggtaatgagcacaagacagataatcatcacaactattgtcaccacgtatgcacctataattcctaccgccggaactaaaatgcagcctataagagcacctataaatccaccacctgaatgcctttcaacactgtcaatgtatgactgcaccggcgaaaccgcgaattcaccatacactgccaggtacataaacacacatataaaccatatgaaaactatggtcataacaagcttcatgatagcatatgaattgcccttattggacacagcaaaaaagctgcccaccagaagcacaagcggaaaaatatatgccaccattccaaatacaccaaaaaggaaaccgcttactgcgtttcccaaatgaccgcctattccaaaattgcttataaataaaaggattgaaacagctactactatccagagaaatatttcctttttaaaggcctgctgcctctctatctgagccattctctccttttttgtctgtctttttgctgaggatttcttcctcgttgccatgtaactaacctccgtgttttgatttacagagtatataataacatatttcttctgttctgtgtaaattttctaaagtaatttttcgattttgtgattaaagggtcaaaaggtatcatcgatgcatgcttgaatgcaattcaatgtataccttattgacccgcactacaccgagaaagtagcaatttgctgcggggacgcagcaaattagcggattcgaggtggagtcagattacgggaatgcgtagcatgtagtaatctgattaatcataaatgaggtgcaaaataccccgccatgaatggcggggcaaaatgttatgcaaaaaccacaatttcaccaaaatattttattcaccaataaggtaattgtataatccctcatatttgaatttcgaagcattccaagagaaatcattagccatgcccctgtccacaatctggttccactcacgcttcttatcgaagaagatgtgcttagaataattgatgactgcaagcatctcatcggcattgtagtttgagaacgagaagccatctcctgaattctcatactcattgtaaggcttaaccgtatccttgagacctcctgtctcacgaacaatcggaacggtaccgtagcggaatgaaataagctgtgtcagaccgcaaggctcaaacctggacggcatcaagaatgcatcagcagccgcatagagcttgtgagccagatcatcagagtaacatatatttgccgaaactctgtcagggtatttccatgcatagtgtctgaacatattctcgtactgaggatctcctgtaccgataacaacaagctgtgtgaaatcgtccacgataccttcaatcacatgattgataaggtcaagacctttctggtctgtaagtcttgaaataagacctatcatatacttcttcttgtcaaccgcaagaccaagatcctgctgaagctttgtcttgttgttgaacttcttctttctgaaatcggaagcattgtaattacaatagattctgccatcagtctgtgggtcataggcattgtaatcaataccgtttacgataccctgcatatcaaaatgtctggcacttaagagtccgtttaatccctcaccatagtactctgtctgaatctcgtttgcatatgtatcactgacagtggtgatgtagtcagcatatacaagaccacccttaagcatatttgcgtccttcttgaactcaagcttgtccggtgtgaacagattgtctgtaagacctgaaacaccctgtacccactccctgtcccatattccctggaacttaagattgtggatagtgataattgtcttgataccccagaagaatggatttgcggcaaactcattctttaagtatacaggcagaagacctgtctgccagtcatggcaatgtataatatccggcttaaaatcaataagcgggagcattgagagtacagccttgtcaaagaatgtatacttctcaatctcaaacttagtgtcagaagtatatggagaaaatcctgtaaagaactcctgattgtcaataaagtaatatgtaatgccgtcctgctcatatttgagcactccgacatacttgtcctgcacatatggacctgagctcatgtaaaaatgggtaacatactcaaaattattgcgatactgctccggtatacagctataatccggtattacaacccttacatcccaatagttcttgtcaaactctttaggaagtgcaccgcacacatctgcaaggcctcctgtttttataaatggtacacactctgaagctacaaatagaatctttttcatattctcctcccgctaaaacccgtgatatataatatttagtttactcttcccaattgtggtatacttcctggacgtcatcatcatcgtcaagaaggtctaagatacggccgatatttgtgatgtcagcttcatctgtcagtgtgacatatgtctgtggaatcattgtgacctctgctgaagccattgtgatgcctgcctcctcaagagcagtcctgactgcatcaaaatcagcaggtgcagttgtgatttcgtagctgtcatcctcatcggcaaaatcctcagcacctgcatcgagtgcctgcatcataaggtcatctgcatccatatcgcactcttccttgtcgatgatgatctgacccttctcgtcaaacatgtaagatacacagccctgtgtaccgatgcttccctgtccctttgtaaaggcattgcggacattggccgctgtacggttcttattgtctgtaagacactttacgataatagctgtgcctgatggtccatagccctcatatgtagctgtctcatagtttacactgttgccgtctcctgccgccttcttgatacctctttcgattgtatcgtttggcatattgttggcctttgccttggcaactacctgtgcaagcttgaagttattggcaggatccggtcctccctctttaactgcaactgcgagctctctaccgatcattgtaaagattttgccctttgcagcatcatttttctctttcttatgcttgatattcgcaaatttagaatgtcctgacataatttgtatcctcttttctacttttaaaaataatccataccttataatatcattttttctcttccggcgcaagtttcttaatcattacctgcttaatcaccttatcctcgacgctcataacagaaaatctgtagccatatgcgctaatcacagtcttatccccctcctccggaatcttatccgaaagcgatatgataaaaccgttaagcgtctcgtaggcatcatcatcaacaggcagtgacagcgcctccttcacatcggaaaactcagtcatgccgtccattataaatgtctcgtcatcattctttctgatgtagttttcttcctcatcgtgctcatcctcgatatttccgacaagctcctcgagtatatcctccatcgcgataagtcccgatatctgtccgtactcatccacaaccatcgcaagatgactctttttagactgcatctttttaaacagatcattgatgtttaccgtctcgggtatgaagtccaccggcctgataagcccgtctatgtccttgatactgctgcggtaaacctcatttttttcaaaaaatgtaaaagcatccttgatatgtaagactccgatgatactgtcaacatcattctcatagaccggaaagcgagatttgccggtatctatgataaattcgattgcatcaataaaggacatactgccgtcaaggcttacgatatttttgcggtgagtcatgatatcttttacttccttatcatcaaactcaaacacattgtgtatcagctctgcctcagatgcaaggattgttccctgctcatgcccctccctgaccatggaaataatttcttcctctgtgacatcatcatttccaagtattccatcgagagtctttttgttgtttttcattccataaagcaatactccaatacacaaaagaagtatcactacaagtattgataaaattataattgcatataacataatgttttattatcctatgtaataagttctaagctgatttcaagcgccctgtctattttaagcaatgtgtcctcatcaagatggcacaccttatccttaagcctttttttgtcgattgtgcgaagctgttctaaaagcacaaccgaatcctttgcaagcgcatactccttgcaggcaagctccacatgggtgggcagctttgctttatgcatctgcgaggttatcgctgcgcagatcaccgtcgggctgtgtctgtttccgacatcattttgtattataaggacaggtcttatcccgccctgctctgagcctacaacaggccttaaatcagcgtaataaatatctcctctttgaataatcatacacgaatacactccatattatggtatacaaaaagtatctccagatttttcgagtgtattcttaaaagttacacttttttagtttttgtggtaaattcttggaacacgcggtgtgataagacatgcaaactcatagttgaatctgcctgacagctcacctaactgctccatagtgattgtctcatccccgtctttaccgagcagagtaacggcatcgcctattttcacgtcaggtatgtctgtcacatccaccataaactgatccatgcagactctgccgcatataggtgctttttttccttttatgagaacccagcccttgtttgaaagtcctcttgaatatccatcaccatatcccaccgggacagttgctatcctcataggatgctctaccgtaaatgtgccgccgtagcttatatgcctgcccggctcaagctcctttacataagcaaccctgctgtgcagtgacatgacaggctttagggagattttactcttgtctacctcctctgacggccacagaccatagagtgtgatgcctgctcttaccatatccatattgcactcagggatttctactattcccgcactgtttgagcagtgcttaattgggatctcgactcctcttgcctcaacaagagctatcatcctcttaaaaagatcaaactgctcaaaggcaggctcctttgacagctcatctgcccttgcaaagtgagtgaatattccctctatcataatattcggcagcttagcaatctgtgcaataatatctgcactttcctctgtcacctgaaagcctatacggcacatgccggtatctatcttgatatgtatcttacaggttttattcttagcgacagcgatacgcgatagctccttagctgtctcatatgtacataccgccgggcgcacatcgttgtccactatctcctcaaactgctccgggaagctgagtcctaaaataagtatcggctttttcctgcctgccgcaataagctgcattgcctcgttgcttgtagcaacggcatagccccacagatacggaagcggctccagtacctctgaaacagcctcagcaccatgaccgtaaccatcagcctttacgactgctgccatcattgtccccggctttagcttattgtgcatcgactccatattatataaaattgcatccagatctatatctgctctgattctgttaattgccatttttttccaccttaatccaaactttatctaatccatcaataatatcacttgctatcataccataagagccggtattgtcaaataccatatcaccggcaagtccatgaataaatgcaccgtatgccgcggcctttttcgtgtcacgacactgtaccagaagacctcccacgataccgcttagcacatctccgcttccggctgttgccataccgcagttgccggacagattgataaacttttcgccatcagccgctgcgataatcgtacgaaaatccttaagcacacaggtcacattgtacaagcttgcaaactctcctgccacaccgatgatatcctcctgtatatcagcaatgctctttttcataagtctggacatctcgcccaggtgcggagtcacgatgacaggcattttatgctcattaagtaatgtcatgttgtctgatatgatattaagcgcatccgcatcaatcacaagaggtatctctgctgtttttagtactgtttcaactaacattttggcattatcagactttgaaaggcctggacctatcaccactgcatctgcccactcaagctctgtctcaagcgctttagctgacgcgatatcagtacaaagcagtgcttccggcaaagcacattggattattgagcggttgcactccggcgttataattttcacaagccctgctccgcttttgtatgcagcctttgccgaaagcaccgccgcaccggccatattgcggcttcctgctataactaacagttttccgaaagttcccttgttggagtgtgccggtctgttatcaagcttctttaaatcagactcatcaagagcccttactgatggcagattaccacaaaagctgtggtcatctatgcctataggcaccaccttaaccagaccgcaataatcacagcccggccacaggagaaggcccgtcttcttataagaaaaagtatatgtgaaatctgctttaaaagtgcatcccatcacatgtcctttatcagaatccactcccgacggcacgtcgaccgccaccctgtaagcatctgccttgttaacggctgaaatcacatctgctaaagagccttctatggctcgcttaagtcctgtgccaaacagtgcatctattattacgtcacttttacacacacactcaatatcagagaccacattaaagccataccttgcgtatatatttttctgcagctcaaagagctcgcttcctgcctcatctgtgccaaaagcatagtacaccatgcatctgtatccggcctgatttaaaagtcttgctatcgcgataccgtctcctgcattattgcctctgccgcatatcacggcaaactcctttgatttatcaaaacatgcaacaagctcccggacaacaccggccgcagcctgctccatcagcaccaccgaaggaaccaaaaagacctgtgatgttgtatcgtccagaagcttcatttcattacctgtaacaatatattccaatatcaattccccttattctcattgtttgcattatcagtatttgcattattggcattgaaaaccataggatcgtcatattcaatatcaaaaagatctaaaacctcagcgccaaaaatatcatgaagatacgaataaatctccctgttgttaatatctctgttctgttttctgattacatttttcttaagttcaactcttatatttgcaatccagtcgtcaatttcttttgattccagtttatttttctcgattttttcactgaagtaatccatcgacaaaagcatcagcctgtcatttacagcttttatattcttctggatttcaataagctctccctcaatgttgtcagctttctcatttatctcatctataagctgcttatccttgtcacgcttttcatcgccgtcatctcccatgttggcaacaatattagacataattttcgacttaagcttttttaaattcttaagctcattgttgtactttccctgcagctttaacagttcatccagttctttttccgtggctgatatttcgtcagtcttaccatgaatggcaaaaagtctgtgccacttctggtctaaaaccagtaaaggcactttttttccttttaatgcagcctcaaaatcttttttatcattcataagactcaccttctatttatttttggagtttttaacaatattatagctgagctgcataaggctgtcagacagatgaacactctccacaaccacatctttatttggaatttcaagatccacatgtgcaaaattccatatagcccttattcctaaatccacaagctttgacgcaatagagtcagcctttgactttggcatggtgagtgccgcaatatccaccctgtgtgttctgcaatactcatccagctcacttagcataaggattggaatacctcgcacactctttcctgaaagctcaggatttacgtcaaaaagcgctgttatgacaaagccaagcttttcaaactttacataattggcgagtgcctggcccagattgcctgcaccgatgataattattctatgctctgtgttaagccccattatctttccgatttcctcgtaaagaaactgaacattgtatccgtatccctgctgtccaaagccaccgaaattattgagatcctgtctgatttgtgaagctgtcactttcattctgtgactcagatcatttgatgaaatacgctccactccctcatccaaaagctctccgagatatctatagtatcgtggcagtcttctgataaccgcctgtgatatttctttactcaagtcttattcctccaatcatcaggatatcatttctcttttaaagacaaaaacccaagattaattataattttttgaaggtcatctgtcaatgtgttaagaatttaacattcaaaaaattcataattatccccgggttatatcttattctaaggctaaaaaccaaatttcagattaaattgtcttctcaagctcctctctgattgccttgatgaagccttcgctgtttaaaacagtaggattttcaattgttgtgatgagtgcgagatcctttgtcatctttccgctctcaatagtctttatgcaggctgcctcaagcttgtctgcaaactcagaaagtgccggaatcttgtcaagctctcctctttttctgagtgctcctgtccatgcaaaaatagtagctacagagtttgttgaagtctcctcaccctttaagtgcttgtaatagtgtctctgtactgttccgtgtgctgcctcatactcatagtatccgtgaggggatacaagcactgatgtcatcatggcaagtgagccgaatgcagatgagatcatgtcactcattacatctccgtcgtagttcttgcatgcccagataaatccaccctcagatttcattactctggcaactgcatcatcaataagtgtgtagaaatatgtaattccagccttctcaaaagcatccttatactgtgcatcaaagatttcctggaagatatccttgaaggtgtggtcatatttctttgagatggtatcctttgtagcaaaccataaatcctgctttgtatcaagtgcatacttaaagcagctatgtgcaaagctctcaattgaatcatccaggttatgctgtccctgaataactcctgcgcccttaaactcatgtattaattctctggtctcagttccgtcttctgctgtaaatacaagctcagcctttccgggaccggctaccttcatctctgttgccttgtacacatcaccatatgcatgacgagcgattgtgattggtttaacccatgtctttacgtttggctctatgccctttacaacgattggtgctctgaacactgttccgtcaagcatggctcttattgtgccgttagggctcttccacatctcctttaaattgtactctgtcattctggctgcgtttggtgtgattgtcgcacattttactgcgacaccgtatttcatggttgcctttgctgattcaacggtcacctgatcatctgtacgatttcgctcctctaatcccagatcataatactctgtctttaaatcgataaaaggtattaaaagctcatcctttatcatctgccagagaattctggtcatctcgtctccgtccatctctacaaggggtgttgtcatcgtaatcttgctcattcttaaatctcctttacttaataaggttttcccaaccaaggtgttccatatttttctttgaattgtttatatgctctctggcgcatttttctgccagcggtgcgtcatgattcttaattgcctcgcatatctgtttatgctcgtgagtggagtttttggctctttttgtctcaccgagtgtcacttttctcactctgccgacatactcatgatagtcctttaataccctcatcagctccttgcttccgccggcctcatacagcagctcatgaaacctattgtccagttcaagaagcttctttgcattgccctttttctcgtgaaactccgtaaggtaaatattctcctccatggccgccatgagctcatccgatatcctcgttgcagcccatctggcacaaagcccctcaagcagagcccttatctcgtatatatccctgatatcgtccgtggaaacaccctccacgaacgctcccttattggggatgatagacacaagtccctcaagctcaagctgacgcagtgcctccctcacgggagtcctgctcactccaagctcatcaccgatattcttttccttaagctcatcgccctttgcaaatgttcctgcaagtataccatccctgatatgattgtatactctggcactcaggctgtaattatcatgtgacatgtaataatccacctcactataatactatattaagctttttacagcaatcagtaatttgaactacaagctcattatctgtgatggtagtcacacgtccctcgtcgtactgctcatctacccattcctttatcatggtcacaagctttgagttcttatctacttttctgtcatccggcagacggtagtaagtgtttatccacagcgctattcctgcaagtcctgatgtattggacacagctacaagaggtggtctgtttaagaatttacctgtatcgaatatgttgtaaatctcctcatttttgagaagtccgtcagcatggattccggctctcgtcacattgaagtttctgccgacaaaaggtgtacggctcggctgcacatatccaagctccttctcaaagtactctgacaactctgtgataaccgttgtatccattccatcgagtgtgcctttaagctgtgcatactcaaataccatagcctcaagtggtgtgtttccggttctctctccgataccaaacagtgaacagttgacaccgcttgctccgtagagccatgccgtagtcgaattgtttactgccttgtaaaagtcattgtgtccatgccactcaatctgtgatgaaggcacacctgcatgtgtgttaagtccgtatatgatccccggcacgcttcgaggtataactgctcccgggaagtttactccatatcccattgtatcacaggcacgcaccttaatcggaatcttgtactcctcctgcagcttcatgagctcaacacagaacggaataacaaaaccatatatatcagaacgtgtgatatcctccagatggcacctagggcttattcctgtctcaaggcactccctgatgactgacagatacatattcattacctcgcgtctggtcatcttcatcttatagaaaatatgataatccgaacagcttaccagtataccggtttccttgagtcctatatcctttacaagctcaaagtccttcttgctggcacgaatccacgatgtaacctccgggaacttatatcctctctcgagacacttgtaaacagcgtccctgtcctttttgctgtagaggaaaaactcgctctgtctgattattcccttagggccaccaagcttatgtaaataatcataaatggtaacaatctgctccgtcgtgtacggtgctctcgactgctggccatctctgaatgtagtatctgtaatccaaatgtcctccggcatattgtgaggcactattctgtcattgaatgctatcttaggaacttctgaataaggaaagagatttctaaaagtattcggctcatctacatccacgagctgataaaaatgctcttcaagctgcagtaaatttgttttttcgttcatcaaaacttctctcatcttcacatctcctgtgcttagttttatcttttgaataattgtatacaattatactttttgtgtcaataaaaaaatttaaatcttagtgtaacactttgttatgtctatcataacctagagtgtaaataaattttattggaggtcacttatgagtgatttagcagcaacaaactgttcatgcagcaatacagataacggatacggatgttcttctattttatggatcatcctgttactgtgctgctgttgtggaaatggtaacggaggctctttcttcggaggaaacgactgtggaagcggcaataacagctgtatctgggctatcatcttacttttctgctgtggtggctttggctgtggcggcagcagcaataacggttgcggatgtggctgcggctgctgatttacatttttactgcgggtcttttcgacccgcagctttttacgatttttcagtattctttttttgcctgcgctgctctttttctttgagcttttcaaggactttacattcgcccttcactctgtgctttttgatgcattcttcatctatctcgtatacgtcgtgaccatctatgataagcatatatcttttttttaataatatatgctgtaaacatgcataatgtgaatcaggtgacatattatatagaaatatattttaaaggatttttatggacgagaacagcctgtttacaccattcgatgaaataacccagacaagggagcttcagatgcttaaaaccataatcccatatatgccgcatgactcacaaaagcagatgactcttatggttcactacatatcacttatgaattcaatgagaatgatagattgtgcaccggcactgtctgttgcagagactgaaagtatggcagacagaagactatccatgctcaatgccttaaagaaatactgcagcaaaagcgaacaggatacgatagacaatctgttaaatattttttcagttttggacaatagggagatttatgacaaagcaggaatttttaaataattttgcacaaaaggaaaaacctaaggacacaacaagtgccatgccgtttctcatggaaagtattaaggaggcaaagcgtaacggcatagaatttaccaaagaagaggtctattccatgtgcactgagctaagtaaaaacctgcctgagaaaaaccgcaggcaggttgaaaagcttttaaaaatgctatagttaatttttaaacgaatctgtatttatgcgaagtatcttgtctatcggagcaggcgaatttcccttgccatccgtaccctcaagatacttctcccccgcagattcaaaaatgacatacaatcttttatccacactgtcaagctcctctgaacccggcggcatctctattgtgatgtcggggctgttgggccttgacgacagagctatgagtgatttgtagcacttaatatacgatgactcattcctgccataggaggtactcagatatacctttcctgaggcatcaaatgtaacgccctgcactctggcaggtatcgtatatgtgctcaggcttgtgagcctgtcgtcctttttgtcataataatatgctaccatctttgacctaaaaaggatattgtgagtggctatccacagcctgcctccatagaatgtgatgcatgacggcttgtttcccacatcaaacacatctaccacacctgtcgcatcgatgacctgcttggaattcgcagtggccattagagagagaaaatcatacgagatgcgctccacagttgtgtcgtaggaattgcacacccatacattttccccgtcaaaggcaattcctcccaggtgactgtttgcatccatgccaagtgtcacaaggtactctccgtcctccctgtcaaataccataagctccccgagtgagcccttgtcatcagaatagcttgtgataagcacgtattcatccgtgatacaaattccctgaggacactgtgcctcactgaaaatataattattgagaaaatcattttccttcgtctccggcatgcccggaatatctatttcatctataaaatcgtaatcgcaatccttaagcgccagtgtatgcgcttttttattactcctgtaattgtaatgctctacgctgtattcattgttaatcgtcctgacccatttggcatataccacatatccatttgctttttcgtaggtcagaacatccgccttttttgaaaaatgctcatccagataccagccatcaaatttataaccgtatttgtgtggttctcttagtcccatgaatttctgctttggtgtgatgtatccataattattgatattatttgccgcaccgcccagattatagtaaatatatgaaacaccatcactttctgacatattgtcaaccagtgtatttagtgatggcccggaagcaaaagaggcagcttctgcctcttttatccccgatgcaaacacatgagtattggtaaaaatcaatgtaagtaatataattaatgctattctactcttcaacttcaacaagcttgcttgccctttcttctatctgttttgcagccacatcatccggtgcctgctcatatctggcaaactcatacgagaatgtgccgcttccactcgtcattgagcgaagtgtggcattgtatccataaagctccagataaggaatatccgcaactatctcctgatatccattgtctgtcgggttcatgcccatcactcgcgcacgtctcttgttaagctcacccatcacatcacctgtatagccctcaggcaccactaccttaagagtggcaatcggctcaagaagcaccggctttgcctccataatgccctttttaaaggcctgctgtgttgccaccttaaaggccatctcagatgaatcaaccggatgataagagccgtcatacagcacagcctttatacctgtcacaggataggctgcaagaggtccctttttcacggactctgcaatacccttttcaacagcagggaagaagttcttcggtacagctcctcctacgaccgtctgctcaaatacatatggcgtatccatatcacctgacggctcaaaggtcatcttgacatgtccgtactgtccgtgtccgcccgactgcttcttgtacttatactctacgtcagattttttcctgatagtctccttaaaggctacctttggacgcataagctctatctccaccttgtacttttcaagaagctcacttgccactacctcaagctgcatatcaccgataccatatagtacagtctgtccattttcactgtcatttacactgtttagtgtcagatcctccattaacagtttctgtaaagactgggaaatcttgtcctcatcgccctttttctttgccttgtagcgcattgccacatacggctttgatatgcttgttctaagatatgtaaccggcatatttcttgtggaaagcgaatctgtcgtaagagtctttgtaagctttgcaagcgctccgatatcacctgcatgaagctccttcacttcctccaccttactgcctctcatcacatagagcttaccgattttttcatcgcagtccctgtgataattgtaaagtacatcgtctgtctttagtacgcctgaattaaccttgatcagtgaatatttaccgatgtacgggtcaactatagacttgaacacataagcgctctttgattttgcaaaatcataatcagcattatacacctcatttgtcttggtgttaataccggtacagcttctcttctcaggacttggcaggtatttcacaatatcagccataagtgtatacatgccccttgcgagaatatttgagcccatgagcaccggtacaatagagccttcaagcacgtttgcacgaagcgcagccctgatttcatcatcagaaaactcctctccgccgaaatatctgtccatgaactcctcacttgtctcagctacagcttcaactaaagcctcacgacatattcccaggttctcctttgagtactccggcacatcaaacttatccacgcctccgctttcattccatctctttgccctctgctggatgacattgacatagcccacaaacttctcattctctctgattggcagatggaatggagctattttcttgccgtaaagctcctgcagctttaacaccacatccttgaagcttgcattgtcgatatccatgtccgtcacgaaaatcatcctcggcagcttgtatttctcgcatatctcccatgctctttttgtgcctgtctgtatgcctgccttgcctgaaaccacgatgattgcagcatctgcagccgatacagcttcttcaacctctcccacaaaatcaaaaaaaccaggagtatcgagaatatttattttgacattatcccactctatcggtacaaccgatgtatgtatagagaactgacgctttatctcttctttgtcaaaatcgctgatagtgctgccatccgctacagtgcccattctggtagtctgtcctgccagatatgccatagcttccacgagtgatgtcttgccacagccgctatggcctaaaagcacgacgtttcgaatcttctcagtagtgtaaacattcatttcaagtacctccctgacattattatagtatgtaaacattgtactaatattttatataatttacaacacttttatgcaatctgacgattatttttttattgttatattggaataaatatgccaataatttattgctttatagtgttaaattggatataatatattgtaaatattccgaaccactatagtgcgattttgagaatgtgcgtgtggtgattctgaatagttacaataaagaattaggagatacacataaatgcattttgataaagttggctttatagggctcggtctgattggcggctcgatagccagaaaaatgaaagaaaataatccaaaggtctcaattatcgcaacagccgggcatcaacagaccatagatgatgcctttgggcttggcctgatagataataatgagcttttagagcttaactcttttaaagactgcgacgtaatctttctgtgtgcaccggtaaacaaaaatatcgaatatctcacacaacttaaggatataataaaggatgactgtatcatcacagatgtaggcagcaccaaaacccagattcacgaaaaggttatagagcttggccttgagcacaattttatcggcggtcatcctatgaccggctctgaaaaaacaggcatactcaattcagacaagcagcttttggagaacgcctactatattatcactcctactgctgcaactactgaagaaaatcagaatgatttcaaacagtttgtactttcactgggctcgatagctctcattttagactacagggagcacgatcatgctaccgcagccatcagccacctgccacatatgattgcatactctcttgtcaatctgattgagcatattgattccgaaaaagagaccatgaaaactatcgctgccggaggcttccgcgatgtgacacgtatcgccgcaagctcccctgtcatgtgggaaaacatatgtgagtccaacaaaacacagctgctctcactcatggaccagtatgaagccaatttccataagcttcgcgaaataattgcagagggcagttctcaaaagatgattgattatttccaggattcaaagaattacagggattcactcacactgcccggtgccaaaatccgcaaggatttccacgagatatttgtcgatattgccgatgaggcaggcggtattgcagtgcttgcaagccttttagccttcaacggcatcaacatcaagaatatcggcatcataaacaaccgtgagtttgaggagggtgtactgcgcatagagttctatgacgaagatgctcttgaatcggctatcagcgtacttaaagaaagaaactatactattcaccgcagatgatttatcctgttatatggttttaatcccaaaaacaaagagccgtaaaacgaatttgattcgttttacggctctttttataccgtccaatgcagcactgtttacaaataagcaaaaaaccaataacactttattaatatacgctctcctcaagtacctcatagaaattctcaaaagtcttgcggcagcaataagggtctattatctcaaccccctctgccttaagccccggcaaagtaaaagacatggctacgcgatgatcgtcatacgttttaattttacaaggcttaatacactctgccggataaatccttaagccattttcagtttcttcaaccctcacacctaattccgccaggttttcctcgatggcatttatcctgtcacactcctgcagacggatatgcgaaatgccttctatccctacaggctcctttgcaaacggtgcaatcgcagcaagagtcagcgcctgatctgagaatgttgacaaatcccagcttccgccatgtatatgagcattctttggtggcatacacactatgccgtctgcctcgtcggaaattgtgcagcccatatccgcaagcacatcaagaaatgccacatctccctgcaggctgttttggtgcacacccatcacctttgacttaacatgtaaaagcgggctcattgcataaaaatagcatgcagccgacacatccggctctatatcatagtctaagctttcatacgccgctttcttagggataataaagctgttattctttttatcctgcatcacatcaagcccaaactgcttcatcataagacgcgtcatctcaacatatgccataccatgcgttcctgtgacattaatcgtaaagttcttttccatcactatcgccgagataagaagggcactcaaaaactggctgctcttgtctacgtttatatcaacagtatcagcatactcccctgtatttccgatggtaaaaggaaaatgatattcgttctcatcatactcaatatgggcacccagcttttcaagcgatacaagcagatccttcataggacgcttcttcatctgctcagaagacactatatggtatctgccctttgacagtccaagaagagctgtaagaaaacgtgcagcggtacctgcacttcccacatctatctcagcttcattctttggtatcctgcctccaaagcctgttattgttatttctcttttatcctcatccaccaaaaccggaaatccaagacgaatcagtgcatctataaaatgtctcgaatcatcactaaaaagacacccttttaaaacgctgcgcccgcttgcgagtgcagcgattaaaagggccctgtttgtgatactctttgagccaggtacactggttactatatcatgtggatgatttactttttttactttataaatcattgaaaatctgataaatatcaatcttgagtgcatcagtgtctgtcataccgataaacacagcaccatagtgatatactccttcttcactgtctgttcttcgtacaatctcgacaaccgcatccacaacctccttggtccaaatttggatcttggtgtcataatatgtatgtatatcaagaggtacctttgcattaaatcctataccgcttctggaaatatctgtgacatccacatgacaatacttaagtgttgtcactccgtcctcatccagccgctctaactgtaccgatacatcaatgtcaagtcttttatgtcttctcttttcttccattcactttaccccatctattatattattgactaagggaacaaattaccctcaaacaacatattagtatatatgactgatttttacaagtaaaatttattcagctgcctcatcgtccatatgcatatcgttcgttataaacatcgcatcaccaaagctgaaaaacctgtatctttcctctacagcctctttgtatgcattgaggacatgctctctgcctgctaatgctgacacaagcatgacaagtgtagactgtggcagatggaaatttgtaatcagacagtcaatcaccttaaagctgtatcccggataaataaagatatccgtccatccgctgcactcttttagcatgccgttttcatcggatgctgcctctaaggtacgagtgcttgtagtgccgacagatattattctaccgccatttttctttgcattattaatcttgtctgcagcctcctgtgacaccatgtaaaactcagaatgcatatggtgatcaagcacattatccacctttaccggtctgaaggtaccaagccccacatgtaaagtcacctctgcaatatctacccccttatcttttacctgctgtaaaagctcctttgtgaaatgcagtcctgccgtaggcgcagcggctgagccgtcatactttgcatatactgtctggtagcggttcttgtcctttagctgatgtgtgatatacggaggcagcggcatctgtccgagcttatcaagtatctcctcaaaaataccctcataactgaactgaatcagcctgtttccatcatcaaccacatctattacttcacctgttaaaagtccgtcaccaaatataatctttgtgcccggctttgcctttttacccggctttacaagagtctcccatacgtcattttgtctgcgctttagaagaagtatctctatctttgccatagtgccttccttcacgccaaaaagacgtgcaggaattacctttgtattgttgagcacaaggcagtcgcccggtcttaaatatttaacaatctccttgaacacatgatggctgacttctcctgtcttcttgtcaagcaccatgagtcttgagctggagcggtcctccagaggatcctgtgctatcagctcctccggaagatcataatcaaaatcttttacgtccataattttcctattcctaacactatactaacgtctaaccacgaagtgtgatacctgcagtctctttaagatgagcaagtatatcctttacaaagccctcgaccttcttagtcttaacctcctcatcctttggtgtaaatactacactgtacgccatgctcttcttattcggaggaagctgtacaccctcgtaaacatcaaacagtgtaacatctgagacataatcacaggcttccctgataccgttttcaatctgctcacatgtgatatccttgtccacaacaaaggcaaaatctctcttctcatcatcaaattttgagattggagtaaatactctgtcctttccataccactgtgaaagaactcttaagtcaagctccattacatatgccggtactctcatatcaagctcatcgcatatctcatatcttacctgaccgagatatccgaccttttgaccgtcacagaatacctctgcggtctgatatggatgaaggaatggcttttgagccggcttgtatgtaaacttcacatcaagcgcatctgctacagtctcagccagtccctttatagtaaagaacgattcatcctcaccgaatacgcctgcgcaaagtgtctctctctcatccggatactctgtaagcggaagctcctttgcgataaagatatttcccagctcaaagattcttccctccaggatacccttcttctgatttcttgctatggcataaagcatctcagaagcaagtgttgttctcataagcgagaggtcaacattgattgggtttataagcctgatagcatgtctttcaggtgcatcctccgggaatctgagcaaatcaagatcagcaggtgagaagaatgagtaatgtattccctcatacgcgcctgctgcacagagcacctcttttatcttgcgctctgtctgctgtctaaggttgagtcctccgagtgtaacctgtgccgtaggcatgaatgcaggaatgacatgatcatagccatacatacggataacctcctcggccacatccggataatcctccatatcctcacgatatgcaggaatcatgagtgtcagctcatcaacgcttacaaccggtgcaaagcctaaatttgtgagtattctcacgatatcctctgtaggaacctctattccaagcacaccattaacctttgcaatagaaaccttcatctcttttggctcaagcgaatttcctgtagtcacctcaacgtgagttgaagaaaccttaccacagccaagctcctccatcaggtgaagcgctctcttcatggccatggctgttgtgtactcgtttacaccctttgagtaaagtgcactcgaatcagatgactgccccaacgcacgtgagctctttctgatattgtctcttgcaaattttgcagactcaaacattacctctgtggttccgtcgttaatctcagagtttaagccgcccatgataccggcgagcgcaactggcttctttccatcacagataaccaggttattgctgtttaactcaaattccttctcatcaagtgtaacaattttctctccatcgtttgcacgtcttactacaatctcatctccctcaaggtatgagtaatcaaaagcatgcattggctgtccgagctcttttaaaacaaagttagtgatgtctaccacatttgagatagagcctattccaacaagtgcaagacgctttctcatccatgccggtgactcagagatttttacatcatgcacatagtgagctgtgtagcgagggcagatgtcctgtgccaggacagataccttgaaattttccttcttcacatcatcagcagtatagtcaagtgcaggctccttaagctcttttcccaaaacagcagcaacctctcttgccatgccatatatacactggcagtcaggtctgtttgctgtgattgcaatatcaaaaatccagtcatcaaggccgaggataggttttacatcatctccagccttagcatcctcaggtaaaaccaaaagtccgttgtagcctgcacccggatagaggtcctcatttaagccaagctctacgcctgagcataacattccatatgaatcatatccacgcagcttgccctgctttatctccatcacgccctctattgtaacgtgatcctttgctgtggcatatactgttgcgccgataagtgcaagaggatatttgccccctgcctttacattgtccgctccacagcagatctggaatgtgccatgtgctccggcatttacctgacacaggctcaggtgtgtctcaggaatcggctcacatttttctacaaggccgactactacgtttgagatatcctttcccacctcatatgattcctcaacctcgaaaccacatgagaataatttttcctctaactcctttggtgttacatctatatctacataatcttttaaccagctaagtggtgttaacataatttttgcctcctgttatatattcaagaaaaatgaatctagttgtcatcaatctggtctaataccctaaggtctgactcgaataaaagcttgatgttgttaattccgtatttgagcattgcaatacgctcaagaccgataccaaatgcaaaaccactgtactcatttgtgtctatgccacagccctcaagcacctttttatttactacgcctgcaccaagcacctcaatccagcctgtgcccttgcataaagagcagcccttgccgtggcactggaaacagcttacatcaacctctacagacggctctgtaaatgggaagtatgaaggacgaagacgtgttgtgacattctttccgaacatcttctttacaagctggtcaagcataccctttaaatcgcagagtgtgatgcccttatctaccacaagtccctccatctgtgtgaacataggagaatgtgtcgcatcatcatccgaacggaaaaccttacccggtgaaacaaccttgataggtggcttctttgcttccataacgtgaatctgtcctgctgaggtctgtgtacgaagtaagaactcaggtgataagtagaatgtatcctgcatatcacgggccggatgatcctttggagtatttaaagctgtaaaattatagtaatcattctcgatttctgttccctcgtaaacctcaaagcccatagatgtgaaaatctctgagagctggtcctttacctgtgttacaggatgaagattaccctttttgcttctctttgcaggcatagtgacatctattttctcgctctcatacttgcgcttaagtgcctctgcctcaaatttcttaaccttctcatcaagaagcttctcaactgcctcacgtgtctcattgacccactggcctacctttggtctctcatcaggagcaacatccttcatgccctttaagacagctgtgagctcacccttctttccaagaattgcagcacgcacatcatttaatttttcaagaccgtcagccttatcaatttcagcaagtgctttttctctgatctgttgaattttgtctctcatcgaatttcacctcataatatttttcttaatttgcataaactcgtaacttcaagcttgaattcgccgtttatgcgataaaaaacgtccctgcatggctattaaaccatgcagggacgaaaattccgcgataccaccctgatttccattgaagaaatatccaatggactctcattgatatgtgtaacgtacataacacgtcatgaactactgtgcttcatccatgcagcttcagtgtgaacttcaatcaatagcctttttgtaagactgctttcagccgatgacaatctctctctggtcaaagtactataatctactatgcaccttcattgcttttattatatatagctgcgacatatatatcgcaaatgcttatttcttaataacacataagtcattttagcacaatctctatattttgcaagtagaaaattttatatttgatttatattttatttctaagccccttaggataatggtttttaacctgtgcaccattcaccttgccccagccggccggatatccgtccacacatacaagtgcccagccctttttgcattcagccgcctgctcatcagataacataactgactgaccattgaaaaagcctgttgtctgcggatcatcccaggtaagctttactacgtttttagcctcacttatcttaagcgcaagtgcaagcgaatgcgacggctcaaagcgctgttttttaaactctcctatatgaagcccagctcgctgcaccttaagccctttaatatcaacttctatatcaggcagcctgtagagctgctccccaaacatgacaagccttgagttttttatccatgctgccatatcctctgaaatggtctcatcaagaaactctgagagaagcttcatattttcttttgtaagagccggcttcgtttcatttttcctgttcttactatttttgttctttttggttttcctgtcagctttaaggtctgtgtccacacagcctcttctcacaagctttgccacaaaatgtccctctccgtccaccttatgcggccagaagcgctccatttcttcaagtgtaaaatcaggatgtctctccaaaaaatactcaattacatcctcattttcttccttcgagaaggtgcaggtgctgtacactatcgtacctcccggcttaagcatcaccgcagcattatccagtatttccttctgccttgccgcacagattgccacattttccatgctccactgctctattgcctcaggcagctttcgaaacattccctctcctgagcaaggtgcatccacctgtatagcattaaaaaagcctgggaaatgtgaagcaagaacaaagctgtcctcatttgtcacaatcgcatttttgattcccatacgctctatattctgcgacaaaatccggcttctttgtgtgttaatctcatttgataccaaaagtccgctgtctcctaaatatgtggcaagctgtgtgctctttccaccgggtgccgcacacaggtcaagcactctcatacccggctttggagctaaaagtgcagccgccgacatggcacttggctcctgtatgtagtaaagccccatctcatgatacggatgctttcccggacgcacattctcatcaaagtaatatgcctcatttgcccacgaaacctttttatctgaggatattttaagtgttttcaatatccgcattctttcttccggactttgtacctttaatgtattaaatctgagggcctgaaatctgttattgtcatagctgtataagaaatcatcccactcatcacccagaaaggccttcatctttttttcaaactctatcggtaaattcattgtcaaatcctcttgttttcttacgaaataattacaatgtatcttactatcacacacatagtcatgtatctaagcacttcgatattaccacatttctactatccatgctatcaattttttgtaggcatatcactgctcactacgtacactgcttatatccaccactgtcacatccttataataatatccgattatatccttatagctgcttcctgcctttgccagcttgtctgccccatactggctgaagcctattccatggccgaagcctccgccggacagtgtatagtgaccatttgcaccggcactcacactaaagcaggcgcttggtatcatcgacatattctccctcacagagccatcgtttaatgtaacttttttctgataatgccctaacgcctttcttatatcattctccgccgtaaaggtctgcgatttgtttccataatttattgtgagcgaaagtacataaccaacatccgacgtcttatcgacagaaatacctgttgctgtgccgtactgaggatcattgtatgccgataaatcaagctccgaggtccatctgtagtatggcgaattgtcatccaccgactccaccttgtgtatgaaatccggtgtactcgaagaccatacctccatatcctcggtttttccggcagacgtagaaaaataatagcatgttattaagcttcctccacatgagacaacctgtcctgctgtagcttttacagcctcatcggtcgactgctttgtttctgaagcgttatagacctgaaaagccgtggtattgtcaatatttgctccgtatagcgcatactgtgtatttttcatctgtgaatatacaaaggttcttgcgcaaacagcctgagccttaagcgcctctgcatcaaatgtagacggcatctccgacggcagcacatagcgcacatatgtctccacatcgactgtattcaccgccacaatacctgcatctgtcccgataaactcaaatgagcccggatagctcttaccgtttatgctgacataattgtccgctgagctcacctttatcttacttttctgtacgtttgccatatatgctcccacatcatcaatagcattgctgccacagtcggcatcatccacataaaggttagacgctgcacctgctgcaattgtgggaaactcatcctttccatcgttttttataagcacccttatgtatgtaaggtctggtgcctgtcttctgacgatggcacatatcctgccggaatcaagtatgtaggaaagtgtttcacttccgattatcaggtcagaaaccgctatttccttaggtgaagtgcctgtctcatcatacacaggcagctcgcttgactgcattggaatgtcaccctgccctgcaatttgcatggtaccgtctccgtacgacagcatcacacctgatatatcatccggctttatctgtatctttttgaccttagagccactgatttcaatatcacagacccctgtaaagctctcctccatggttcccttagccctgtaaagctctccatcacatatgaaaatcagccttccatcgtcatttgacacaatatatgcattctcatacaccatatccttcgtcacagccctcgcctgttttacaagtgtccctttttccttttgcgccataacaattgcaaaaacaataaccacgcataccatggttatcgcaagcattatccagaccatctgattcggcttttgccgtcttcgtcttctatttgccaaatttctgttctccttaacacccaaatagtggttactgctcaaaaaatgggagctgcaaaaacagctccctttatcatctgtacttaagaatcctttgtgctttaaaaatcttttgtatctcataaatctcttgtgcgtccggagttcttttgtacattattattcttttgtaagaacccaaaatgccggtcctgtaatttagactcctagcgctcttgctaggtgggtaaccgcagtctgccttctgccttccgctgcataatgacggcctgacatccaacagctcatataggaatcccgtttaaagtaaatgtaggttctaaatacacagggttgtcgaacatctcaggtatctttgtaaattcattatactttattatgtctcatgttgcaatgcaaaattcatgttagaatttaacaaatttttctctggcatttcgtaacatatttgaaaaccagataattactgcgacgaatataatcatctccacatatgaccagtacggtatctttttgaggcaatccgaaactatcgcaactatactgataacaaagatcacaatgccgaatacaagtgactttggataaatataagctatatatccggccgtatcctttatctttttcatctcatcctcagccacaaaggtactttcaattttgccgcttttcttcattcgcagtgacacaaatattatgtaaattcccagtatcagtgtgaccgcatctattataataaaatagttcatgcttctttctcctgtatttttatttattattcctaaatagttatcacggatcttatatatacaaaaaatatgtaaaatcaccaaaattagtataacctcatgtaaggaaaaaataaatggtaaataagtcccaactatttcttgaatttctattattaatgtagtaaaatatatttatattttcaaggggaaggagtttttaaaatgcaacttgacgatttaaaaatacttatatgcgatgattcgattctcgcaagaaaacagatgaaggacataatcaattccattggttcaccgactatcattgaggcggcaaacggacagctcgccattgatatgtacaaggagcataagccaaatctcacatttatagacattgtaatgccggtaaaggacggaaatgccgctatctcagaaattatggagtatgacagcagtgcgaccatctttgttgcgtcatctgtcggcacacagtccgagcttaaaaaggctcttgctgccggagcatgtgacttcattcagaaaccaatcgacaaggatcaggtcataagtctgattaagaagcacataggaggaaattaatatgtatactcaattttttggcaattttctcctatcaaaggggtttatcactaatgagcagctttttgacgctctcaaagaaaaagcacaaaagcacgcaaagctcggtactcttgccatccactcagggcttatgacagctgccgaggttgattcagtaatagtcgagcagacccatcaggacaagaagtttggtgagcttacaatagaaatgggctatctgacagacgagcaggtaaaggagctcttaaacatccaaagccctgactttcttcttttaggacagattcttttagacaaaggcataattgacaataccactctcgaaaagagtatacatgattaccgcaatgagaatgctatttccgatcttgacatggtactcgaggataaggacagtataaatcatctgataggtcatttttttgccaatacaggcatagatccttctgccattgacattatgtatcttgagcttttgtttaacagctttatccgatttgtcggtgatgactacactccgctctctgccgagatatgtgacagctttagtgcggactgcatggtacgtcaggacatcaagggcagctatgccatatctacatacataggcatgagtcagacaacagccatcaattttgcatcacgctatgtaaatgaatcattttcagtatacgacgagtatgtacaggcatctctcgatgatttcctgaacctgaacaatggactgtttctggtcaactgttcaaatgatcaggcacttgagcttactctcactgcacctgagcattttgatggacagacacgcagcttcaataaagcctgcaagctcaagctgttataccctttcggagccattcactttattattgaattctaatatctctgcaaggcagtttcagtaatctgataattatttactagagcacaaaaagaacatctgcaatcagcagatgttcttttatgttgcgctatatataattatatattaaacaaattacaattatgtgattaaatgggcaaaaggtaacattatattattactgcacaccgagcattttcttaacagtgttttccatctgatccacatcacagactgtgttgtgaaggatctttgcatccctgatttcctcaatggcatttggtaccttaacgttgccgagctttgaaagctcatcgacaagctcaaagtctgtcattgaatcgtacttaggatcaattgcatccatcacacttcttgtgaatttgaatggacttgctgtagatgcgataacagtctttgtggctgtatcacctgtagcatccttatacttgctatatacacctgctgcaactgctgtatgagtatcaataatgtatcctgtatcctcgtaaagctttttgataacctcagcggtttccttctcacttgtgtaatttccatagaagtcagaaagcttttccttcatctcaggtgttacagtgtatttgccatccttagcaagcgaagccataagctgagcattcttatttgcatcatttcctgcgatacggtaaatgagtctctcaaggtttgaagagatgagaatatccatggatggtgaatttgtgaggataaactctctgtttttatcatactctcctgttgtgaagaaatcgtaaagcaccttgttctcgtttgaagcacagataagctttgcaacaggaagtcccatattctttgcataaaacgctgcaagtatatttccaaagtttcccgtaggaacaacgatatttatcttctcatcctttgcgacagctccctgtgcaaaaagctttgagtaagcatatacatagtacacaatctgtggtacaaggcgacctatattgattgagttggcggatgagaactgatagcccgcggcatccatcgtctctgcaagagccttatcattgaacatagcctttactgctgactgtgcctggtcaaagttaccatgaatgccgactacatgagtattggcacccttttgtgtaagcatctgcttctcctgaatcgggctgacaccattctttggatagaaaacgataatctgtgtcccctcaacatcagcaaagcctgccatagctgcctttcctgtgtctcctgatgtggctgttaaaatgacaatttcgtttttaacattgtttttctttgcagatgtgataagtaaatgaggcagaatggataatgccatatccttgaaggctattgtagagccatggaacagctcaaggtagtaagccccgtcagcaaacttaagcggtgcaatctcagtagtatcaaacttgctgtcgtatgccctgttgatacaatttttaagctcttcctctgtgaaatccgtaaggaaaagcttcataacctcatatgctacctgctggtatgacatcttagaaagctcctcaacagaaacatcaagtgccggaatgctctcaggtacaaataatcctccgtcatcggcaaggcccttaaggatagcctgtgaagctgttattttcttttcactgtttcttgtacttgaatataataaatccattttttacctcatttctctttttatcttatctaaatccatattgctgcatctatatgcagacaattattatcctttatagtataataaatttcatatatcaaatcaataacaaaaatgctacaattatataaatgttttaacaaacaataacaaaatatatgtgaaagggacacaatacatctatgctgcaaggagtttacaccgctgtcagaaaagacggcaccatttactacaggtccaacatcacctacaaaagcaaacacatcagtctcggaagctttgacagtgagctttctgcaagccgcgcctatgccactgcatcgacaattttattaaaagaaacaaacagcatagaggactcttactttcacacccatgcacttgcatttgataaaattgtaactcttattaattaccgggacaacggcatgtacataaagacgcccatatatctgcgcaaaaattatttcagctactatctggatatatcacatgagctgaaattcgatatagacgatttgttttactactctgagcatcgcatcttaaaacgccagggacatctgtacgtcaacgactacggcatgcaggtcaccctgcttagccgctatggcatacagcctcatgctgtttgcggacgggactatgtatttgtaaacaacgattcaaccgacatgcgctacgaaaacatcaagctgttaaatccataccatggtgtagagattatcaaaactgcagggctcgacaaatataaagctcgcatacacataaacggtaattttgtcataggaacctacaacacaatcgaaaaggccgctattgcatacaataaagctgtcgatatggctcatgcacatggcatagaaaaaaactatcccgaaaactatatcgaaagtatatcaggcaaggaatacgcggatatttacacttctgtgacagtttccaataaatatttgcagtatctgcagcaatttgatttatagaacgcatatcccacagtttgcatattaccattatttttaatattgtactaaaaactcccgcggttatataacctcgggaatttttataattacttctgatttatatagtttacaagtccctcgcagtcgataatcttctgcatgaacggtgggaaggcctgtcccttaaacttctctcctgttgtctcatctgtgatgatacctgaatcaaagtctactgtcacctcatcaccggcttttattgcctttgctgcctcagggcactcaataataggaagacctatattgattgcatttctgtagaaaattcttgcaaatgtctctgcgataacacagcttacgccggcagccttgatggcaatcggtgcatgctctcttgatgaaccacagccgaagttcttgttggctaccatgatatctccggcctttacattatttacaaaatccttatcgatatcctccatgcagtgtgttgcaagctccttaggatcagaagaattcagatatcttgccggaatgattacatctgtatcgacattgtctccatatttaaatacacaaccgtgtgctgctttcattgtgattcctccaatctttacataacatcctttggtcctgaaatcttacctgtgatggcacttgccgctgcaacagcagggcttgccagataaacctcagaatccacatgacccatacgtccgacaaagttacggtttgtggtagatacgcatctctcgccctcagcgagcactcccatgtatccgccaagacatggtccgcaggtaggtgtgctcacaatggcaccagcctcgataaatgtcttaagaaggccctcttccatagcctgaagataaatcttttgtgtggcaggaatcacgataaccctgataccatccgcaacctttttaccctcaagaatctttgctgcaatacgcagatcatccatacgaccgttggtacatgaaccgattactacctggtcaatctttacatcacccacctcatcgatggtacgtgtattgtcaggaagatgtgggaatgaaactgtagacttaagtgtgctaaggtcgattgtatactcctcatcatactctgcatcactatcagcctcatactctgtgaacggacgctttgaatgctccttcatgtactctcttgtgagatcatctacagggaagataccattcttgccgccggcctcaattgccatattggcgatagtaaatctgtcatccatagaaagatatttaagtccctctccgacaaactccattgacttataaagtgcgccgtccacaccaatcataccgatgatatgaaggatgacatccttgccgctgatccactcagccggttttccgacaatattgaacttgatagcagaaggtaccttaaaccaggccttgcctgtagccattcctgctgccatatcagtacttcccacacctgtagagaatgctcctaaagctccgtatgtacatgtatgagaatcagctcctataatcacatcacctgctacagtcagtccctgctcaggtaaaagtgcatgctcgatgcccatttttcctacatcaaagtaatttgtaatctcatttttgcaggcaaactcgcgaacacatttacagtgttctgctgacttgatgtccttgtttggtgcaaagtgatccataacgagtgcaattttatctttattaaacactccctctaccttcatcttgtcgatctcatgaatcgctacaggtgaggtaatgtcgtttccaagcacaagatctaaatcagcctcaatgagctgtcctgcactaacagagtcaaggcctgcgtgtgcagcaagaatcttctgtgtcattgtcattcccatgcttatattcctcctagcatataaaaatattgtattatgattgtatctgaatcaagtttacttaagacatcataacatatgatttaccataataaaaatacataataaacatatttaccataactaaatctcatggtataataaacataaatttgttgatgttcacacctttttgtgacaagcaacgattacagcccattaaaagtacaaaccacaggaggtacaaatgaaccagaatctctcatcttactggattttctatactgtcgccaatgccggcaatatatcaaaggcagccaaggagctctatatcagccagcctgccatcagcaagtcaattcaaaagctcgaggacggactggaatgcaagcttttttccagaagctccagaggtgtcgtcttgaccgatgagggcagacttctttatgatcatgtaagcgaggcctttgaggcattaaatgagggtgaggaaaagctgaagcgctcaatagagctcggtgtcggccagcttaagattggtgtcagctcaacactctgcaaatatatgcttttgccatatctcaaggaattcatacacagaaatcctcatataagcatctcaatcgaatgtcagtccaccaatgagaccttaaagctcctcgatgatgacaaaatagatataggtctgattggaaaaccagcatcccttaagactttcaatttctattatctggacaacatcgaggatatatttgtcactacaaaggactatctgcgcaacttaagcgcccgtggtgtcaaaaagagcgagattttgcaaaactctactctcatgcttctcgataaaggcaatatgacacgtaaatatattgatgattatctgcaggagaaccagatacacgtaaaggactctatagatatatcaaatatggacctgctcatcgactttgccaaaataggcgtaggtgtggcctgcgtcataaaaagcatagtttcaaaggagcttgctgacggtaccctgattgaaattcctctcggcataccaatccacaagcgtgaggttggctttgcttacaaggagtcttcaaagctttccacctctctgcagacctttatcaagttttatgagagctacacaccagaggatttttaaataaaaaaatatgaccccggaggtattaccttgaaagaacaaatacacactatccccatatcagacgcctttgacaatgccggcgaatgtcccttctgctatatagaaaaacgcactgaggatcacgtcatggattttgtacttggtcatggtgcctcttacatggaggctgacatacgcgatatgaccgataaggagggcttctgccgtgcacatttcaaaaaaatgtttgactatggcaattcactcggaaacgcctggatactaaaaaccatgtacatgcgccatattgaggagatggacaaagaatttaagaactttaagcctgattcagtgcaaaggagcggtcttttcaaaaaagcaaacgcctcctccaattccatcgtggactggattaacaagcgtgaatcaacctgctttatatgtgacagcgtaaacaagacctttaatgcatacatgaagaccttcttcactatgtatgaaaaggatcctgaactaaaagaaaaattaaagaacacaaaaggattttgtctcgatcacctgaaagtggttcttgaaggagctgacacttatttaaaaggtgataagcgcaaagaattttacgatatcgtgctcccactaatgcacgaaaacatgaaccgcatatatgaagatgttgcatggttcatcgaaaaatatgattataaaaataaagatgccgactggaaaaattccaaggatgcgatccagcgcggtatgcagaagcttcgcggaagtgatccatcacttccaccacatgttctcaaaaaataaaatcacccggtattctgccggccgtctagtggctgtgcaaaataccgggtaatttttatttcattacgatgtttacaatacgtcccggaacataaatctcttttacgatatttcctgtaagcttatctgcaataacatcctttgcttttgcgataacctcatccttaggatcctgttttccgattgcaagagtgcccttagtctttccgttgatctgtacagcaatctctactgtatcctcaacagtctttgcctcatcgtataccggccatggctcaaatgcgattgtatcgtcatgtcccattctctgccagatttcctcaccaacatgtggacatacacaagaaagcatcttgataagtccctctgcaaactctctaggacatctgcctgccttgtatacttcattgacaaaaatcatcatctggctgatagctgtattgtagccaagtgcctcaaagtcgtttgtgaccttctttactgtctgatgatagattcttgtgagctttccatcatcctcttcgataatattctccggctcagtaaagaaattccatacacgtgtaatgaatctctttgctccctgtacgttgctgtcgttccaaggctttgaaacctcaagtggtcccatgaacatctcgtagagacgaagtgtatcagcgccgtactcctcgactacatcactaggatttactacgaactccgggaatctcttgcccatcttgataccgtttgatccaaggatcattccctgatgtacgagcttcttaaaaggctcctttactggagataagccctgatcaaagaggaatctgttccagattcttgaatacatgaggtgtcctaccgcatgctccggtccaccaacatagagatctacaggcatccagtgctttaagagctcctgatttgcaaattccttatcattgtgtggatcgatatatctcatataataccatgaggatcctgccgagccaggcatggtggatgtctcacgagtaccctttacgccgtttctgtcatactgcttccactctgtagcgttctcaagaggcgccttgccattcttgcccttgtagtcctcaagctcaggaaggacaagcggaagctcatcatcaggaaggaaatagattgaaccatcctccttgtatacacatggaacaggctctccccagtatctctgacgtgcaaaaatccactcacggaacttgtagtttacagttctctttgccacgcccatcttctcaagcttggctgtgatagcctccttagcatcctcaactaccattccggtaaactcctctgagttgatgagcttgcagccctttccaaggtaatcatgcttctcaaatgcatgctctgatacatctgcaccatcaattacctgaatcatctcaatatcatgagcctgtgcatactcgaaatctcgctgatcatgggtaggaactgccataacagcacctgtaccatagcttgccagtacgaaatcaccgatgaacatgcgcacttccctgccgtttacagggttgatacaatgaagtcccttaagctcacagcctgactttgtcttgttaagctcagttctgtccatatcgctcttctttacagtctcatctatgtaagcctgaacctcttctttgttctcgactctgtccatgagaccctttactatatctccgtccggagcaagcaccataaatgtgataccatatattgtctcgatacatgtagtaaagatagagaactctccaccgcctacaatctggaatttaacctcgacacctgtactcttgccaatccagtttctctgcatttccttggtagactcaggccagtctatctcatcaagcccctcaaggagcttttcagcaaatgccggctggtcaataacccactgtttcatgttcttgcggactacaggatagccgccacgctctgacttgccatctataacctcatcgtttgagagaactgttccaagctcctcgcaccagtttacaggcatatcaatatgctttgcatatccggcctcataaagcttcttgaaaatccactgtgtccacttgtaaaactcagggtcacttgtagaaatcatctttgaccagtcataatcaaaaccaagctctcttaactgctttgagaaggtctctatattcttctgagtgaaaccgtttggatgatgacctgtgtttacagcatactgctctgccggtaaaccgaatgaatcatatcccatcggatgaagtacattgtagccctgcattctcttcatacgcgacatgatatctgtagctgtatagccctccggatgtccagcgtgaaggcctactcctgaagggtaagggaacatatcaagtgcatagtatttaggctttgaaaaatcccaaacatctgtcttgaatgtctcgtgttctttccagtattcctgccattttttctctatggccttgtgattgtatggttctgacatacttgcctccttatatcaaaaacgctccgcctctcaaagagacgaaggcgtatttttaatccgtctgattaacattcataattttacacatcacactatattttgtcaagttttgctatataaaaaacccggtgcatcactgccccgggtcttattgtcatatatatctgacagattagttgttgatgagcttgtcgctctcatcattccagctgtaaagcttacggatttcctcaccaaccttctctgaaggatgctcagaagcaagctttctcatagccttgaagtgtacctgacgtcctgccggtgacatatcaagtaagaactccttagcaaatgtaccatcctgaatgtcagaaagaatcttcttcatagctttctttgtctcagctgtaacaatcttaggtcctgttacataatcaccatactcagctgtattagagatagagtatctcatacctgcgaagcctgactggtagataaggtctacgatgagcttcatctcatggatacactcaaagtatgcgtttcttgggtcataaccagcctcgcaaagtgtttcgaaaccagcctgcataagtgcacaaacaccaccacaaagaactgcctgctcaccgaagaggtctgtctctgtctctgtacggaatgttgtctcaagaagtccggctcttgctccgccgattccaagaccatatgcaagtgcaaggtcccatgcctttcctgtagcatcctgctctacagcgataagacaaggtgttccttttcctgcctggtactctgaacgtactgtatgtcccggagccttaggtgcgatcatagctacatctacatcctttggtggcttaatgcatccaaagtggatgttgaagccgtgagcgaacataagcatgttgcccggctcaaggtttggctcgatgtccttcttgtacatatctgcctgtaactcatcatttataagaatcatgatgatatcagcctgctttgcagcctctgcagcgacatataccttgaagccctgctcttctgctctcttccatgacttgctgccctcataaagaccgatgatgacattgcatcctgaatcctttaagttaagtgcatgtgcatgtccctggctgccgtaaccgataatggcaattgtcttgccctctaataatgaaaggttacaatcatcctgataaaataatcttggttctgccattttgttttcctcctgttaatttaagtaaactatttatatgtaaggattgtcctgtgactaatccaacataactacatcatcggaacctctggtaagtcctgtgattcccgttcttgcgagctctaatatttcatagccgctaagtaagtctatgaacttatcaagcttgtcctgtgtacctatgagctcaataatcatagagtcatgagtgacatcaactatcttgccgtggaagatctcagtcacattcataactgcctgtctttgtgtatcgagtgctcttatctttatcataataagctccctgcacactgagagtcccggctcaagcttcttgatatcaagtacatcctcaagcttcgctaactgcttctctatctgctcaagcacctgctcatcaccgcttgcaacaattgtgatacgtgtgtagcgcggatctgctgtaacccctgaagagaaactatcaatattaaatcccctgcgactgaacagtcctgaaatacgactggtcactccgggattgttctcaactaaaagagataatgcctgtcttctcatcgaaaaaccttcctcacaatttctattatttctgttcacatgatgataatattactataatctgtatttgtcaagcaatatcgttaatataacttaaattcatattatcaataacaatatttatacatccataacctcgataaatgcctgttttataacgttttatacagtatcttcaaaaaaagccgggcgacatacaaccgcccggctttagaattatctaatataattctgtttaatatattataactgtggtcctgctgcaacaagtgctttaccagcctcatttgttgtgtacttaacaaagttcttgttgaatctctctgcaagatctttagcctttgcctcccactcagaagcatcagcatatgtgtcacgaggatcaaggattcctgaatcaactccaggaagctctgtaggaacctcgaaatcgaacatagggatcttctttgttggagcattaaggatatcaccagaaaggatagcgtcgatgattcctcttgtatccttgattgtgattctctttcctgttccgttccatcctgtatttacaaggtatgccttagcgcctgacttctccatcttcttaacgagctctgcagcatattttgtaggatgaagctcaaggaatgcctgtccgaagcaagctgagaatgtaggtgttggctcagtaattccacgctctgttcctgcaagctttgcagtaaatcctgaaaggaagtagtactgtgtctgctcaggtgtaagaatagatactggtggaagtactccgaatgcatctgctgaaaggaagattacgttctttgcagccggtgcagaagatactggcttaacaatatttgtgatgtggttgattgggtaagatacacgtgtattctctgttacactcttgtcctcgaaatcaatctttccatcatcagcaactgtaacgttctcaagaagagcatctcttctgattgcgttgtagatatcaggctcagactctttgtcaagaccgataaccttagcgtagcatccaccctcgaagttgaatacgccgttgtcatcccagccgtgctcgtcatctccgataagaagacgcttaggatctgtagaaagtgttgtcttacctgttcctgaaagaccgaagaagattgctgtgttctctccgttcatgtcagcgtttgctgaacagtgcattgaagcgatgcccttaagtgggaggtagtagttcatcatagagaacatacccttcttcatctctccgccgtaccatgtattgatgataacctgctcttttgatgtgatgttgaatgcaacacatgtctctgagttaagacctaactccttgtagttctcaaccttagcctttgaagcattgtatactacgaaatcaggctcgaagttctcaagctcctctgctgatggctggatgaacatgtttgttacgaaatgagcctgccaagcaacctcaacgatgaaacgaactgccatacgtgtatccttgtttgctccacagaatgcatctactacgaaaagcttcttgttgcagagctctttcttagcaagatccttaactgttgcccaaacatcctctttcattggatggttgtcgtttggatactcaggtgtattccaccatactgtgtccttagaattctcgtccataacgatatatttatctttaggagaacgtccagtgtagatacctgtcataacgttaactgcaccaagctctgtctccttaccaacctcgtaaccctcaaggccggcttttgtctcttcctcgaataatgtctcgtaagaaggattgtgaacgatctctgttgttccggtaatgccatactttgttaaatcaacatttgccatttgaataaacctcttttctataaattatggatttacatccatttcttttgttagtatatatgtttgttaaaaaaaaatcaatatctacttttcaatttacacttatttcacactttttcgacatgtataatatatttcccacacatcagccgttcgcatatctggtgagaaactgcctggtacgctcctccttcggatggtcaatcacctcatgtgggtcgccatgctcaacaatcacaccaccgtccatgaagatcacctgatccgcaacatcacgcgcaaaggccatctcatgcgtgacaataatcattgtggtattctgctgcgcaagggaacggatgaccttaagcacctctccggtaagctccgggtcaagagctgaagtaggctcatcaaagcagagtatatcaggcttaagtgccagtgcccttgctatagctacacgctgctgctgtccacccgagagctgatgcggataatggttcatcctctcagcaagccccattctgtccagaagctcctttccatgctcatcaatacgtgtaaggattgcttttttatcctttttaaactcaggtgtctcctgtgccagaaggcgctctgccagagtgacattctcaagtgctgtgtactgtggaaaaagattaaactgctgaaacaccataccaaaatgcagcctctttttgcgaagctccgcgtctttatccttgcccgcttcagaagcatcaaaaagagtctcaccatttacaataatctggccactgtcaggtctctcaaggaagttaaggcaccgtaacagcgtagtctttcctgagcctgatgaaccgattatcgcaagagcattgccctcctccatggaaaagctgacatccttaagcacattagtccttccaaagtgtttttctatatttctaacctctaaaattgccatgtcttcctcctacctgaaataatccagctttttctcgatataattaaataaaagtgtaaggattccgacaaatacgagataaaatacacctgtataaaacagcggccatgtaagtccgtcagacttcataaacgccgctcccgcaaaggtaagctcgtatgccgcaataattctggcaagagaagtatcctttacaagagtgattatctcatttgacataggcggaacaacacgcttgatcatctgaagcagagtgattttaaagaaaatctgctgctttgtcatgcctaacacctgtccagcctctctctgaccggccggaacaccctctatgccccctctgaatataacagagaaataacatgcatagttgatgacaaacgctacaaccgtcgctgtaatacgtccggtctcgtcaccactccatatagcctgatgaagccaaagccccggtccgtagaatataatgataagctgaagcataagcggtgtgccgcggataacccatacaaacacattcatgacagccttgacaggcttaaacctgctcaaaagcccaaatgcaaatataagccccagtggcagtgaaaatataagtgtcagtataaatatttcaaaggtggtccacagaccactcataagtgcttgcgtaacagtccagaacattttatttctcccgctcaacaactacctgtgcattgttacagtatgcatttgtgcattccatagactttgtaacctcatctgtgagtgtcatgccattccatacaacgtcaatcttctttgaatcaagctccataaccttgttgtcccagtcgataactacaaattcaacatccacaccgagcttctcaccgacaagtcttgccatatcagcatcaaagccaatccatttgtcatccttatccttgtaatccataggctcaaactctgtgataccgacaatcatcttgccctgtgacttgatataatccacatcactgtcgctgtcagactgcttgaactcgcaaggctcctgctcaagaagtgaatcctgtactccgtatttctttgcaatctcctgcgcgctgccgtcagcatatgattctgcgaatacactgttgatatatgaagcaagatcagaacccttacggcatccgacaccatacttctctgatgtaagctctgttgtatgtactaaatcagggtagcttgtgccctctccaatcatggctcctgccattaaaaggtctatgattgccgcatcagatgtacctgatttaacctccataagtgcatcagcctgtgatgaaaccgaattgtaattaaagcccttttcctttgccacagcctctcctgctgagcctgcctcaactgcgtaggtcatgccgtcgcccttttcgcttttttgtgttcctgcacccttgctgccaccacaggcagtcattgaaagtgctaaagttgctgtcaaaagaagtgctaatcctcttctcatgctcatttcctccatatgttaaataatcattgtaattattcaaaatcatccaataactacaaccttttaacatattagcaaattatcacgctaaagtaaagaggaattatccaccaaatcaacagttatgttcttccattttatacaagccccagacttttaattatataaagccaaagtgtcagtgtaaacgcactgagcagtgtcgtgagcattatcgtggtcgatgagataacgccctcatgccccatatttcttgccatgacaaagcagcttactgtagtagctgagccaagcatcacaagaattgcaataagctcactgtccctgaacccgaaggctaccgcaataggaagaaatactgccacaaagcctacaagcttgataaatgtggctgcaaatgcaggctttgcctttgctgatgcttttttcaaatcaaaggtggcacccatggccataagccccataggcgttgccatattgccaatgctcgtcacagcctttgccggtattcccgcaaacggcagaccaatagctgaccacagaagtcctgcaacaattcctaaaataataggattggtcactattcccttaaatgtctttttgagtactgccctgtctatgccgttttgccccggcttaaaaaatgaaagcactataacagccatcacgttgtaaagcggtacgcttcctataatcatgacgggtgccatgcctgcgtttccataaatattctggataaaagctattccaagcagtgccgcactgcttctgtatgaggcctgtataaactcgccccgtatggatttatccctccacagacatgatatgagcgttgagattgtaatgcttatcaacgtaaccacaaagcagaatactataaatttaatgttccaaacccttgaaaaatcaactgccgcaagatcactaaacagtaaaaaaggtaaaggtatcttaaacacaaacttattcatcctgtttgcaaagtcttcgtccaaaatccccaccttgcgaagaaaaagtccaaacaccatcatcagaaaaataggtcctgtggcatttagacaaaacattaaattttccatctcaaattaagcctccgtcatatcagtaatctgtagtttataattatactattttgtacattccagctaccacaataagctttgaacttagatatgtcaaccttttattgcactgtagattattttaaaaaattatggtacacttatcacatattttatttaggaaggaattaaacggtttgaaaattcttattttatcctgtgacaccggcgagggacacaacagtgccggtaaagctataaaagaagcggcagagcataaaggacattctgtgacaatgatagatatgtttctcttatcgggtaaaggaacatcgcacgcagtatcaggagcatatataggcattgtaaagcatattccgtttttcttcggactactctataaggttggcatgctgatatcgagtgataaacgtaaatcccctgtctattttgccaatgccctgctttgtaaaaagctatcagcatacattgaatcaaacggctttgatgctgtcgtcacacctcatctgtaccctgctgagactctgagctgcatgaagcgaaaaaatctgcttcatatccctgccgtcgctgtgggaaccgactacacctgtatcccattctgggaagagacaaatgtggattattatgttattccacacgatgatctgacagatgaatttgcaaaacgtggtattcctgaaaacaagctgctgccattaggcatcccggtacgacatgccttctgtacaaggactgctaaagctgctgcaagaacaagattacatctgccatccgatgtgcctatctttcttgtgatgagtggcagcatgggttttggcaagcttgctgtctttgccgcagagcttgcaataagatgccataataatgagcatattgtaatcatttgcggcaacaatactaaaataaaacgcatactgcaaaatgagtttaagttcaacaaacgtgtacacgtaataggctacaccaatcaggtttcacttttcatggatgcctgtgatgtaatctatacaaagccaggcggcctcacatcaactgaggcacttgtaaaaaatataccgattgtacacactgctccaatccccggatgcgaggcagcaaatgttgcatttttcaaaaaacgtcatctgtctgtctcatcaaagcgtctgtcaaagcagattgagcttgggaaaataatgatagaaaataaagagctaaatgcagaaatgatacgtgcacagcgccgtgagcgaaagccctatgctgccatacagattgttggtctgcttgaagaactgactcacactgatacaactgactgactataaaaccatgtaactataaaactataaggaaattatcatgccatattttttatttacactcttaggcttcgtactcggaagcactctctttgcttactggataccaaaactattaaaaaacattgatatctgcacacttcccgatgaccacaatccgggtgtgagcaacgcatttatgtatggtggctttttatgcggaatactatcactcatatgtgagcttgcaaagggatttatcccggtgtatctgggtcagaaatgcttagatataaactcacttctgtttgtacctgttttagttgcacctgtctttggacatgcatttccttttttacaaaaacaaaaaggcggtaaagctattaccgcctccttcggagtccttttgggcctgtttccggaattgcatccggctgtctatctggcatttttctttatattcttttcagttgtagtaataataaatccacattcgctcagatctattctgacatttggtttttttgcattcaatgtccttttgactataaaaacagcctcaatccagattggctgcttcataatcgcagggatcgtgatatacagacacctgataaagcacaataacggaccggtaaggataagtatactgcatcagcggtaattattgtatctgcttttactcattgattttgcttcttacataactgtttattctcatacatataggaatcagccctatcaaataatatttgtattgtactctccttataatcctccgatatcgcccatccgcaagcgtaatcaatttgcagttcatttccggtgttgtttaatttatctttttccagacataagcatttcaggatttcatcaacctccgctttatctgtgtcataaatgactaccataaattcatcgccgccatatcttcccacaaaatctttttcaggaaatacgctgcgcaaaagtccggcaaactttactatcagccggtctcctgccgaatgccccattgtatcattaataaacttcaaattatttaagtcaaaaataatgcatgccgtaggtgaactgattatctcattattgttcagaatttctttacaggcacttctattaggcaatcctgtacgggcatcagtatatgctctttgctctaacagtttattttgccttgccatcttcattgccattatggtctgtacaataatcaatatcacaagacacagcatatcaagtgctgacaaaagctctatcgtgcggatctttgtagcaatcttttctgaataattttccgctgcagacacagtatcatcagccagcttaaaataagtctcactcatattgacaatatcagtattttcatatccgctgcttcttacagcttcaatttctttttttattttattccaataatcaatctggacctgcaatttatcctgatattccttgtcctgaagctttatcagatcataatttccatcctgatattttaatccgctcaaaatatcatccaaatatttaatcaactcatcattttgggatcctgtaatctccaattttacttcacgctgtgttgctccacgtaccagacctgcgtaatttattacccttgccgttccttgcagccggttaatctgtatcatcataaaaataacaagaataaccaatgcaaagataagacagctttgtataatacctattatatttctgctttttttattctttaacttcattttccgatttatccttatgaggatttttatggaaattatatagtgtattataagttatgtcaaccgttggaaggcctttttaatccgaatacttttgtatactctttaacgcatcttacacatgttttttcgccacttacatccaaatgcgagacattatatatgaaatattgtatgattaactcaccaaaaagaaaggaggattttacatgaaagtaagtattgaactttcccctgaatacagcgaaccatatgccatcatatatgcagataaaatcactgacaacatccagcgtacccttgatatattcggttcaaatgaaagccccattacagcttttaaaaacggaaatgatattgtcattttacagccaaaagaaatatacatggtaagggtagaaaacaaagatactattatttatggcaaagaacaccgctaccgttcccgaaaaagactgtacgaaatgcaacagcagcttggtgccggatttatgcaaatttcaaaatcaactttggtcaatctgtcttatatgagcaatgtcgaggctggttttagcggcactcttcttttgaaactaaaaaacggatgtaaggattacgtatcaagaaaatatctgcctgagtttaaaaaatatctgggattataggaggacaaaaatgagagaaactatgaaaaatttgattaaaaacactataaccagcattggtatagcattaaccgttttctgcgttacaggaatggtatttgacatcacctatgacggtaatttcagtttagataattatcaattttccaaaatggttatcggatgcataattgtaggtctgggttttggacttccggccatgatttatcacaaagacaatcttccaatgccttttaaaataattattcacatgggaacaggctgtattatttatacaatcgtcgcatatactgtcggatggataggaggaacaagttctatccttcacggaattattgcagccatatttcaaatagctttggcatttataatttggggaggcttcatgcttcactatcgcaatgatgtcagaaaaatgaatgaaaaaatcaaggaattatagacttgttcgtactgcgtgtctgtggagtgatactctgcaatatcgaactaaaaaacgagggcaaatcaaaccgatttacatcgaatttgatttgccctgtaaataccgtttgtattctatatcttttccgttatttgtgtgtataaatatatgatactgatttatttactttacgcaatactttttccattacaaagaggaagccggtacatgtgaagtatccccgccaggtctatgaaaaaatttaatatgagaatttttttgtttaattgtgtggatgggttgaatagttcgaagaaatcgctaaaaatataatagctttaaatattagcggaaatatttttactcatatctccacttatattttgcgaaattttgttatctctttccagttacacggaaatcccatatattcaaaaagatcattcaacttcaaatttaaattctgcttttgatatctgtcaaaaatatgccataattgctttttaaacagtaaaaaatcagtctttggaagtagataacgaaaagtaatgactacactaaacaagtcatttttaccatatatatattttgaaccgtttttagaaattcctaattttttatgtaacaatgtatctggaatgtcaatatatgtgtgatatgaaaacaacctttcgttatgagcacatacatttctgtacagtgttaatacctttaaatattttatcatttcatttttcttgatatttccaaaatcctgacaaattgctccttgcatattttgaggtaagaattcaaacattttggatatctgaccaaaagtaagggtattcataatcacccataacggaatattatgatatttgttacgctgataaacaagatattcatgatccttatttttattagccatcatatctagcattttgattaatttagtaattccatttttattttttggaatattgccgtaattattggagttaagatattcttcttgacgttctccatgttttttacagaaatgataagaaatggacgaacgcatttttctttctacacgacataaatatttaaagaatattccacgtaactcttcatcaaattcataaagagcaactatatcttcaaaacatgcttcattaatatatttgcgggtatgaatatcaataaaaggatgcttgtatccgccaattagtgcatagtaactgatattttgcaaggattctaccgcaaagtcatcatctgtaataactagatctttttcatttttcagtttttcaacctgtgcggtatatgtaataaacggtttgctcatatgtacctcgctgcaaaatgttccaaataaaaaaaggagaggggcctcggcaccctcccccgatcgcaggcttctcaagtttctgcaatctgatcactaaagataatataactgatataactaagaaagtcaatcataaattatctttatttagattgtattcaatatggttatttttatgtactattcaaatacattgtttaatattccttcatcgctatatatgtacctgtattactttaatatcttccttatctgcttatcagtcgcctccggatacatctcatgcatatcttaaaatcgcagttgcacagatatgtctgcatcataagattcgttattgcaccatcaaatcctttttctccatccttgccaaatccagcttgttttttcaattcattggaataaatctctgaatcagcattatcctccataaaattgaccattatctttttatgcttattaggagctttcccatcatcatataatgcatcaaaatcatattttgttctgtgttacaataaaactactaaaaaatggctaagtcttttttcattgccttgtagccaattaatactgtccaaacatatgcacaggtttttggaatcatcagcatgccgatcatcggaattacatcagccaacagtacaaccggaatatagaatgcaaagctcaggacaattgtcagccacatccaacgaaaagagctatcgttattttcttttgcacttttatagaataaaactatgataattaatcccatcagtgcaaacggaatatttcggtaaattccccatgaaagcggagcatctgcactgagccaggcattctgaggcatcatacacagaacaattcttaatcctgcaagaccataaatagctgctgtagctgctttatagcctttaatttgataacgctcacgccatatatgatagagaacgacataaaaaatagtcatagtgacagaggtaatccactttcctaacccaagctgtacggtaaagttctcaagacctgttgtacaaagcgctgttgcacgaggaaccagatgaaatgcatctccacttcctaaaataactgccataattccaaacatggtaaactgacggtttcctttgctttttcgaatcattaaaattccgattgtgattaccgaaaacaaatatacggtatcaaataaagtttctacaattgcctgcataataaaattcctttcttacgatacatctttaaacgcttaggtgaacattgttcattttgtcttaaaaattttcccacactctaatgtgggagaattttaatataatgttttgttaatcaacatcaaaatcgaagacggattataatcctgacgaatcattgataccaatattaaagaaaataatatatctgcaaactgtttttccgtgaattgttcatcaaatacatctggacgaatcttaggatcattctttaatatatcacacaatccattaagaatatgcccccatgtctgcagcattttcttctttccatccgttttttcatccttcataaatccaaacgaatgcagtgaaaagaagcccggaaattgctcatttccatattccagtcttttataaatccatgagatacaggcagcaacatctttaaaaacctgctcatcttcagggttaaaaaagatttcacgccaaatactctcaattgtatccccaagcaaatcggccttggattcatagtaattgtagattgtccccgccgaaacagaacatcgggatgcaacagctcgtatgcttacagcagtccatccgttttctttgatcagctctctgcttgcagctaatatgtcttcttttgaagttgcaagatggttcacgagttcactcctctccaatgtaatgtcattaagttatttcattaaatgaacgatgttcatgtttaaaatatacactgttcattttattttgtcaataacttttttaggaagccctgatacatttatttgacttcaataaaaatggtgtatgccatactcactaagtataacatacaccattaatatttaattattttctatatttatcatcacctgacaaccatcatccgtccatactttaagaacagccggctccttcgatttgacattcttccatcgaactgctgccagagcgcttccatcaaatgttgttactgaatcagaaaaatagtcctcctcactagaaggattagctgtaccaaatccttccagcacaccatttcctacaacactagcatgaagcagtcttttttcagcttcctgtgaattaattgtgccattatcatctacaagccatatcttgatatatgctatattcctctcattctcagttacacgacacacttttagctttgttactgattttgctgtagaaagcacatattcacccagtttcctatctttctgatatgcaactgcctttaaagttcccggttcatatggcacttcataagatgctgtaaaatgattttctcttcctgccggttttcttccaagcgatttatcattcagaaaaagctctacttcatcacctgatgaataaacgtccacatttgccgttgtcccttcaaatcccttccatgtccagctactgatgttatccttaaacatccatgcagttttaccagctgtctgtcctgcgtgttcaagtctctcgaccgcaatatatggtttatctgtcagcccatacactatttccctaaaataactgattggtcttcgatttccaatcaaatcaatatccccgatatatcccagtctctcaggataaatacttgtgaaattggcatttccatcataatggaatattcctacaccagcctcgcctatatagtcgtaaccggtccatgtaaagtctccaattacgtgtggataagtttcaacaagcttccagagattttctatgtcagccggatatgtttccgtaccgaggaccgttttagcaggatgtagttcatgctccagctcatatcttccacttaaatagttgagtcctgttatatcgcagctttgcgaacattcttcaagtgcttctgaaacaagcggatgctttgcaaaaaactctcctttttcacctgacatcagactcataaaactgtttaaggcattgcttcctcctccgcttccacttccatgtgaatccattccaaatttttctgcaacatccctcataataaagccaagacgcctgcctgcacagtttaatccattcaatgcattcgttgtatatctggtattatcaagctcatggaatttattgcatagcattctgtttatccaggctccctgcttagttcctgcttcctgtatttcatttccaactgaataaataataaccgatggatgattatagtctttttcaaccatatgattaatccactgattatattcatcttcaaaaatatcggagaaatcatatgtatttttttccttgtcccacatatccgtcagctcgtccataaccagcattccaatatgatcacacgcatcaagcattgctctgctcattgggtgatgtgcacttcttatagcattaaagcccgcttccttcaatctcttgcaacggtaccattctgcctccttaaatgtctcagcacctatcacgccattatcatgatgtatacaggttcctcgcagcttaaatgtctcaccatttatctgtaatccacgtacaggatctagcgccaatacacgtattccaaaattagaaactgcttcatcacatattttatcatcaaactttgtcgttatatgacactcatataacgccggctgttttggactccatttcttcggatgttcaatcggtatttgtacacgcactgtctgcatttgctctgagcgaaatactactctttgcgtatccgatgcagttttctgcccatctttttttatctcaatcagacattctgcctctaatccatgtccaataatgtttttcaactgcgcacacacctctataaccgccatgtcatcattcactgacaatgttgtaatacgcagcttatcatgtgaaatatatacatcttttccagtccacagattgacatctctgtaaattcctgagcctgaataccatctgctgttaggctgtttactgttatcgacatctattcttataatattctcatgctcgtagcttatccatggctttaagtcaaccgaaaatcccatatatccattacgattcactgccgctagcgctccattaatccagactcttgcaattccataaattccttcaaattccagaaatacatcatgctttttccactcattttgagccataaattttttttcatatgtatacacacctcctggataaaatccactctgtgctcctgaaggacagtccttatctcttttttcacgaatcattgcatcgtgaggaagtgtaacagcaactgcattactgttcccataaaaggcttttaatctgtcagcctgatcagctttttcaaatgtccagtcctcattaaaattatgacactgcatacttcattcctctttcaatctgttagtctgcttgttctgctctttccatgtcaattctcttattttccttttccaccttcattaaaccaagaagaatagtaattacaacgccaagaattacagggattgtgatatacatactgaaaatcatatttgtagctgctgcggtctgagttgcagcttttccggcatatcctgctgcatgcaatagccagcctacagccgcagtaccaattccaccaccaacttttactccaagtgatgaacagctaaacatcattccatcaatatgtacccctttcgtacgataggtatatccgctgatttcagcaatcagggcatttaatgttcccgacattgttccggcaaatgttcccttaaggaacataaaaagtaacatcatcggtaaattcttctgcatcgcaaaaataattagaaatattcctaagatatcactgattacatatccccagaaattaaccttttgcatgcttccggtcttctttacaagaatcggagtaaaaataagtgcaattattacagggaacatcttcatcattgagaacagtccaagtaatgaaccatttccaagtacatgtttcataaaataaatagctgagcctgttgtaagattactcatgaaataataaacaatataaattgcaacaattaaaatatagtatttgttacttataagtaacttcaaagactcaacaaaacctattttgtcatccttcggtttttgtgtatcatcaactgctgcactaccttcttccggtaactccttaacacacaggcagcttattgtgttgacaacaagtccgattacaccacatataacagcaaccatacgccatcctgcagctccaccgccaaaggcatcaactgcacctgttactgcaaatcccattacaatatttgtagcaactgcaaacatgaaacgtattgatccaagctgaaccctttcattcttgtttctggtaataagggctgataatgctgaatatgctattccgtttgctgtataaaagatagcattgagtgctgtataaaatgcgaagaaatacgcatattgtgcagtttcactcattccacccggaattgaaaacagcagcaccagacaaagtgatacgcctatctgtgcatacagcatccatggtcttgcctttccaagctttgacttagtgcgatcgattaaatttccaaatatcacatctgaaattccatcaagaaatttcgataccagcattaaagttccaataattcctgtgttaagccccattgtatcagataaatataaaagtacaaagcttgatacaagtccatagctggtatttgaagccagatctcctgctccatacgctatcttctgataccatttcaggtatttcttttctgtttcctgcataataaatgcaacctcctttttcctgttaacaataatagtttgtattgtatttttcataaacgcttatgttttgtatactgttactttaataaattattgcttacaattctataacatatgtgataaaatatcagttagtttttatcatattcgtggataaggagaaaaatataccattatgacctcatcatatactgtcaaaaacatcatagaacaggataatataaacagtacaatcaattcatacatcaaaatacttacaccaatacagttcacactcgaaacatgtaacagagctaacgatgacaaatatctgaattttttgatgacttcaccacgtgaaaatacattttacagctttaaaacagaaaaggaaatcaatcattttaatatgaggcctccacatattcatgatttttacgagcttcttattgtattggatggcgaaatccatcagctgattgaaaagactgattttgtgttccacagtggaagctgttgtcttatgaaccacaatatagtacacaaagaaattttttcttccgatgcaactcttttgtttatcggaatgtcaaaagagctagtccaacagctttcagaagatgaaccaaaagtttattttccggatatagaaagatccggccataaccctattcttagatttctttcagataatctcgataatcctgacacaaaggaatatcttgattttatgccatcgctaaacaacaaagactggcaccatactctccacgccataactgacaatatacttcgtgccattatgtatccaaagcttggttctacttatgtcatcaaaggaatgcttttagaattgtttgattatctgtccaatccagaacactttcatttcacgcccgtccatgtagaagcagacaatgattttcttcttttcacacacataagtcacattttagaggacaccaatggacgcattacacgttctgagcttgaacaattattaaattacagtggaaattatttaaactctatagttaagaaatatacaaattcatgcctattcgattacagtcagactttctgtatgaaaagagcggctgctctcctgcttgaaacgaccgcttctatatctgaaattatggatgaactgcattttacgaatacaacacatttttataagtgcttcaaagaacattatcatatgacaccgaagcaatataggatttcaatgaaaataaaacttgtgccatagttgcaaaatgttcctcatcctgtatccttcagccagattttttgtgaatattcaagtttttcaaaatacatataagcattctttaaaagcatttattaatacttaatcctaaaataatccaaatacgctttatacttgtcctgcgcggtcaggcaggtatctgtcagatatcctttttcgttgtcccattccttcaatccacgataataaaacattttcaaattatcctcaatgataaacggaacaatattgtattttagacactctttaaacatagtcaatctgcccacacgaccgtttccgtcctggaacgggtgaatccgttcaaacttcacatgaaagtccagaatatcctcaaatttcttttcttctttggcattgtattccgccagcaatgccttcattttatcggcaacttcttccggaagggctgtatccctgccaccgacttcattcggaagtttcttataatcaccaacagcaaaccaatcttttctggaatcgctggtgccattcttcaaaaccaagtgaagttctttgatgaatttctccgtcaaagctgcttttgcatgatcaataatcatgtcgatacaacgaaagtgatttgccgtttcaatcacatcatccacattcagcacttctttttctacgccaatagtattggtttcaaagatatatctggtttgatcatgtgtcagacggcttccttccatatggttggagttgtatgtcaaatcaatctgtgtcttatggtatattccaccggaatatttacttgccttttgctctttcagaatatccaacagcgtaatcggttcttcttttcttttgttaatgcgctccggtttctctgcgttttcaggaaggttccatgtcttacctgtaagaaatgcaccgttcacacgccccttagcacagtaatttctaacactgcgctctgacatattccatttttttgctatttcagcaactgaaagatatcgcatctattatcctccgccataaattatattaaataaccttgttaatctattatatagtataccacattatcggcaaaaacatcagtatattttaatctaaattattatatttttgccgttaaaaatctatttctcaagtcagaaagccggactgtcaagcggctgtttcatatattgcgggatacaagaaatctgttttaatagcgttgacaaatgtgtaaaatgaaacgctacattgaatgctgcgcaaaagtcacctcgaaaatcgttcccccggtcttgcctgatttaatacaaatactgccatcatgtactctaacgatttcacggacaagagcaagtccgagtcctacgccacccagctcccggcttctggatttatccacacggaagaatggctcgaacactctctccctaagctcctttggtattccgcttcccgtatcttctacagacagataaacatgcttgtttctctgatatgcggttactgtaacctgtccgagcggatgattatatttgatggcattctcaaccagattgtatacaagcctgtaaataaggatatcactgcctatcatagtggcatcctcacattttccaatcagctttatattcttttccacggcaagaggctcaaggtctgccaaaacctcttcaacaatagcatccaatataattttatcatcccttcccaccgactgaagctcactcatgtctagaagagtctttaccatcctgtttaatttatcattttgttccgtaaccatttttatggtctgcaaagtgtctgcatcatttcccgggtgagaggccgaattatataaatcaagctgtacctgcattagcgctaatggagttcgcagctcatgtgctgcatttgcagtaaactgtctctgtatctcaaatgcatccgacagacgctcaagcatcttattataagaaatacccagctggttcagttccttaacattgttttcctctattcttgaatcagacagattctgagcctgtacctcttcgattttatctgaaaactctctgattggtctgagtgcatgcccgcttataaaataagtgacgacacctcccaaaagcgccagcaaaaccgtgattatcagactgtttcttttatagtcggccttattattgtacacctgaaccgaaaattcatccgcaaactcatcccacttatcgtccggtatgctgatatatatttcatctgatttgtttcctttttcatccccctgtgactctaccgcatcctgcagagaatcgatgtaatgcacaccatttttatagacaaacatagtcaggcagccacatataatagcaatacacaatgtagtaatgcacgtaagtctccactgtagcgacattcttttcatctgtcagactcctcccgtattttatagccttcacctaccttgttcaaaatgggatcatatcccagcttcgccttaagcttttttctaagtgaagacatatgtaccctgattactccgctaaagctgtctgccgtggcatcccacacatgctctatcagctcctcctggctcaccggtctgcctatattgataagtaaatattccaaaataccattctcttttcttgtcagtggaaccggctctccctttgcatatgcctcgcgtttaatcgtatcaaactttatttctccgcatttaagacatatatcattctgtacaaatttccttcttgtcaggcttctgatacgtgcctcaagctcctgcagatggaatggtttttccatgtaatcatttgctcctgcatccagtccctctaccttatcagcaatctgacctcttgcagataatatcaaaaccttagtttcatcattgtattttctaagctccttaagaagctccatgccatccatccccggcagattcaaatccaaaactatcagatcataattctccgacagtatacattcaagagcctctttcccatcataacaggtatccacctcataaccggcagcatacagactctttgcaaccatatcacatatttgtttctcatcctcaacaattaataatctcaaaatgttctcctgcttcttaacaataattttacaacctatattgtataataccaaagtcagctggtcaacaatacaacaaaaaaggagcaacattatgttgaaataccaaaaaacatgtcaaatcattctgcttatccttggtgtatccatggtaagctatggtgcagtcagaggtgaggcagctaccgtgcttggtaaagcaataaaactatgtctggagtgtgtcggaattggataagaaaaagaaattactatcaaaaaagctggcaaaaatacgtggatggatacaggccgcagcaacgctgctgaccaatattcatattccgaatttatttaagggtaaaatatatcagggcaatgcaaaaacagtatgtgtacccggattaaactgctactcctgccctgccgcgacaggagcctgtccaataggggcatttcaggcagtcgtcggatcatcaaaatttaagttttcatactacataaccggattttttattttactcggtgtaactctcggcagatttatatgtggttttttgtgcccatttggatggtttcaggatttacttcacaaaatacccggaaagaaattatccacagccaaattaaagcctcttaggtacctaaaatatgtcattcttattgttttcgttatacttcttccgatgcttgtaacgaactctataggaatgggagacccgttcttctgcaaatatatctgtcctcagggtgttttagagggtgctataccgttatctattggaaatgctgctatccgttctgcgctgggaaagcttttttctttcaagtgtatgattttaattgcagtgattgtactaagtattttattttacaggcccttctgtaaatggatttgtccacttggagcaatctactcattatttaataaggtcagcctgctcaaaatcaccgttgatagcagcaaatgtgtcggatgcggtcaatgctcaaaggcatgtaagatggatgtggatgtgtgtaagacaccggatcaccccgagtgcatacgctgcggtgcctgcataaaggcctgtccgaaggacgccatctgctaccggtttatgggaaaatcatgtcaaaaaaatgacaacagataactattaaacattttactattatttttaaaggagaaattactcatgaaaaacaaattatcatttatttctatttttacactctgcatagcattatcacttacagcatgcggtggaaagcaatcttccaacacagattctaagaacactcagactgaagccggctcagaaacatccggcaaatcagattccaagcttgatgatttatatcagcaggaaaatcagctttttgcagatcacgctgatgtttggaacaaggcatttggcatgatgaacaaaagtaacgccgatccaaacggcaattatgctgattatcttgccggtaccgtagaatcaaacaaggattcattcacagacgatgagcttaaaacacttaatgaggatattgaaaccatacgaaaaatcgaggaacagatagcagagcttgaaaacaaaaataaatcatcagacgataacaagaaggacagctctaaagcctcatctgtattcagtgatttttccggtgaggattttgatggaaataaggtggatgacagcctgttttccggtaatgcagtaacagtcgtcaatttctggtttaccggctgcaaaccatgtgtcgctgaattatccaagcttaacgaattaaatgatgctatcaaatcaatgggcggagaagttgttggcatcaacactgagaccttcgatggcaataaaacagctatcaaagaggctgcctctgttcttgaaagccagggtgtcaaatatcgtaatctgtcaattaactcctctagcgctgccggtaaatatgcctcagaaatcatggcatttccaacaactatacttgttgacagaaatggcaatattgtaggcgaaccaatgctcggcggaattgataacaaggacaactatgatgcccttatgaagcagattcagtctgtaattgatgcagacagcacaaataaatagaggtctgcatataaaaaagctcctgtgcattgcacagagagctttttagtcaaatttgtaatttatttctatactcgcttggtgtcaatctatatttttctttaaaaacacgattaaaggttctaagacttccaaaaccactgtccatcgagatttctgtcagggtatcatctgtagtttcaattctctgacaggcataccccagacgcgtctcattcacatattgattaaaactgctgtggaatgtctttgaaaacaatcttgataatgaaaatttgctcacgccaaggtcatgtgccattccatcaagtgatatactcttattaaaattggcagaaatatatgatacggtacggtatattatatcatcgctgccaattttgctcttctccaccaatttcatcatcggaatacatcttgctagtataatctgcaaataagcttgaacaacccatatatcattctgcccagtatctattatggattccactgctctgtacacttcatccggaataacatcactttttacaacaggatattgtggagcattattcctcagtacattttcaaatctaccaaaaatcatttgtggagcattaataaaaaccgcctcattgacttctgatgaaaacacctgataatgatgtataacatcaggaaatactactcctatatcacctgtttccatgtgatacagctcctgtcctacaccaagctctaatgttcctttcgtaacgcatacaatttccattgcattatgcagatgtggtggctggtgccgtggcttccgctttactgcaataatctcttcatttgtgttttcatacgttaaatgcactcagatcatctctcccatattatacgataattattcaattcctttttctcttctaagcttttcatttgcagcttctacattcatctttgaaagaagaattgtaataagaatctcaaatacaaatggtaaccataaatacattacctgaagcatagtaattgcagatgccggctgagtcgcatttgtacctacataaccactgatttcaagcagccatcctacaatagctgttccaattccaccaccaattttgattccaagtgatgtgcatgaatacatagttccatctactctctttccctgagtcaggtaagtatactcagagcactcggcaattactgcattcatgtctccctgccaaggtccctgtcctaatgctgcaactgcagtaaacagcatcatcagtggaacgcttcccatgtatcctgctacaatcacaagtgctcttgctatcgtagccagaatatatccacgtttattaagcttatacattcctttccactttccgacaagagttggtgtgaaaataagtgctattataagaggaatatttacagcccacgcaaatacaccaaacagatttttattcttaagaacccatgtacaataataaatacctgccccaatcatagcactgtataactgctgcaaaatataagttccacaaatcatcatatagtacttattcttaacaagcagcttaaatgcctgaacaagaccatacttcttttcttcatcgttctctattccggagttaagctcctcttccggaagctccttaaccgacaatcctgaaattgtatttactacaaggcctatcaaagcataaataatagctacaaatctccatgcagcagcacctccaccgcatacatcaacaaatgcaactgttatagactgaattataagacttgttgaaaaggcaaaaataaaacggtaagagcccatctgtacacgctctttgctgttctttgttaccagcgaagtaagtgcagaatatgcaatattatttgctgtataaaatacaccattcaataatgtatatgctataaaaaaccatgcatactgagcagtcctgccccagcttgtaggaattgcaaaaactgctacaagtgtcaaagcacaacctatatagccataaatcatccaaggccttgcttttccaagctttgtatgtgttttatcaataagtgacccaaagaaaacatctgtaaaaccatcaaataattttgatgctgcgattaatgttccaacgattcctgatgcaagtcctatagtatctgtaagatataccataacaaaggatgtcaggaatgcatatactacatttcctgcaatatcaccggaaccataaccaattttgttgtaccactttaagtacgtcttttcttccatgaaaaacctccaattaattactttgttttatctttaacagctatactaattttatatatttgtgcaaattttgtctataaacataataggctgtaatatgcacaaaatgatacttttcaaacactacagtttcacagctatttgactcaattccatttgaaacgtaatcaatacacaatatcatgctctaaacattttgtccataaatgcaaatagacaaagcatgcataaaatgctataattcgaatggaggtgtgtaatgtatattaacacgggatatttgaatcattcacataaagattttaaagataaaagccgccctctgattgtaggaagctgcggaacctatcgcctgtcacagcatcctaagatgcctacttacaggccaaggggaagactggattaccagattatatacatatcatccggtcttgttcatttccactttgacaatcctgaaaatgagacaatcattccagcaggacatatagtgttatttcgcccaaaagagcttcaaaaatatgaattttatggtaaggataagactcagatatattggcttcactttaccggaagcgacgtaaaaaacactttaagaaaatacggatttacagacaataaaagagtctttaatgttggaacgtctcttgaatatgaacaggttttcaaaaggattattacagagcttcaaagatgtcaggacaattatgaggaaatgctcatgcttttgctacgacaccttttgattatatttaaccgtaaaataacaactgagcatgtaatcagaaatgaattccttgacagccagatggatacagcaattacatatttcaatacaaactacaaccgcgctattaacgtggaggaatatgcttcatcaattggtatgagcataagctggtttatcaggagctttcggaaatataccggtaatacaccaatacaatttctcacatcactaaggatgacaaacgcacaggtgctgcttgaaacaacgtcctactctataaatgagattgcaggcatagtaggatacaataatccactatacttcagccggttatttcataaacaaaaaggatgttctccttctgaatacagagccagaaatacatgatataaaaaacaaaagcaggggcaaatgctcctgctttatctggcttaagtcaaaaaccaaaaccacttctaccaaaatcatattgttccatcagcaatattataatgccaattttttcactatacttatctttttaattaatgactaacagattgtaaaagaataatccttatcagtctccgcactgatacgataatcctcttccacatcagttccccagctgtcgatacctccaacacctcttactgcgccatatatgcataaaacagttcttcttgccggtggcagttcttcatggtgaagagcgttttcaatctcagatgcggtataaggcagacaagaaaatgcaaatttttcatcattcttttcaatgcgcagtgtctgtgacgagctatctgtcctgctgttatcaagagccgtatgtcttgtaatttcaagccactctgtatccattctcataccacattcctgcggaacaagatattgtgtaagactcagatcacctatctcatagacgccttcttgtgcacctgcttttctgtcaggatatgtttccccggagagtcccttatataaatatttgtcagccaatgttggcataataaatctcattccaaatacaggaaattcagggagcccctgtactccattataatgtacatccacgcgaatctttcctgacgcatcaacgctatagctcacaagaacagttgtcgccggagttgttatggtctcgtatgtatattttacaataatttcatcagcataaacatcaccgccatagctgttattatcaggtgcatatggtttttgctccttgccatccatgatcacctgtattcccttacagtcaataaacatatctgccgaaagccagcttccgcttttaatatggaacttgcttcctctgtcattatctgtcaacgctctccagaaagtaggctttgggcaacgatatagccactcatatccatttttaacgatagattccagtccaccctgtgcataagagaaaatataatcaaagccttcaccatgtacacctaatgtatagtcaccatagaccactcttaatttatctgtataagccatagtaatacctcacttcctgcattgccggtttttctttcctgtcagcaaatacaattccatttgctgagaattcataatctgacggtttatcatcaaaatctccgccatagcgtaaaacatcttttcctgtaacggaatcttttaccataattgcctggtcaataaaatcccatataaatccgccatgatacatatcgtatttgtcaatcagcttcatataagagccaagtccacccattgaatttcccatatcatgcatgaattcgcataaaatatacggttttttcggactgttattcaagtattcctctacatcctccggttttgcatacattctggtctcaaaatcagaaatagtatcctcatatgccctattataataagcgctttcataatgaactaatcttccatccttcttttcggcaaaataaacgttcattgcctcaatgtcgtctcctgcataggattcatttcctaatgaccagaaaaggatggatgtatggtttttaaaggtttcgaaattgttttttgcacgctcaagcactgcatctctccactgtggaatagatcccggtacattgcatgacggttcgattgcccctagtttttggaatgagccatggctctcaagatttgtttctgccatcacataaatacctgcatcgtcgcacatatagtaccatggtatctggtcaggatagtgacaggtacgcacagaattaatattgtttcttaatatacatgatatatctgccttcatgtcttctataccaatgcatcttcctgttcttgcattccactcatgacggtttactcccgtgataacaagacgttttccattcaaatagactactttatctataatctctattcttctgaaaccgatatcataagggattacctcggccagtgaaccatcctctgctttaagctcaacataagcatgatataaatatggattatgattatcccacagctttacactttccaagtcaacacaaatcgtgccttccaaatggtcattttctttatttaactgtaatgacttctcaactaatatattttcttctctgtcttttaaaataaagccagcagttacattgtgactgtcagtagcagataccttcatgctgacagatacgcttccgctttcattatcttgatttaacacaggtttgaaccatacatcctccagatgaacatccggaattgccttcaaagtaacatttctgaaaattccaaaaaatctgaaaaagtcctgatcctctaaaaatgccgccgtgctcatcttatgtacctgcactgccagaacatttcccttttccttaacatatggtgtcagatcaaactctgaaggtgtgaagctgtcctctgcataacctataaactgaccattaagccacagatacatagcttcttctacaccttcgaagcatatatgtattctttttccacacatgttcttatccaaatcaaagtatttgatataagagcctaccggattgtactgtgcttctgagaacattccttcttctgctcctgttgcctccatactatatgctcctctgtggtactcttttccttcccacggatacatagtgttgatgtaacgtattttatcatatccagccagttcaatatgtcccggaaccataattttatcgaatcctgatgcatcaaatgttgccttataaaaatcaacaggtctttccatcacatttttgctgtaagcaaactcccattgaccatttaatgactgtaataatggatttttttcttttttcatgtcagaataatccagataatagcaatgatcactatgtggttccaattgatttaccttaaacacttccggactatcaagccatttcatatcagcgttcatatttttcctcactttactattattaatatataaaaccaagaacaataactgctttgctacatctaagatataacaaaaccatagcaaagagcaatgtaataaattgtacaaatcatgcacaaaatgatactgttataattactgtattaagcaacttttgactatatattctgttattttggcaagtaataattcttttcgtattctataatgacatcgtaaacagaaaggagatgaatttccatgagaaataaattacacaattttattgataacttacttagcttttacgcaagcttctttactcacagattttatcaaatgtaatgtgcacagcatacataaaatacctgatgtcccccatatccttccactaaagctatgagtcgcattccagttttcttcatcctgtaatgtccatacgatcctgattcctatcgtattgttctgcctaatctttggcaggtaatttcctataacaataaacaataagcttgttccataataaattaatgctataaataaatcctctgtttctgctccaatatgtgtcaatctagccataccattatatagcaatgtcattaatgacataaactcatatccatttcctcagctgccttcatctgtgtcatttttttcacgtaaatctcttatattatttccaatcacatatggatcaaatttagtcctgcccacttctgctacatccatcacttaacatacatagtcatcagcgtgtgaaatagttaccggaaccgggccgattactatgcagtaaaccgcaactccctttgctgcaagtgtcaaaatgaacttttcaaggtcagacacattgtcagttatctcattcaggcttcgcaccacaaccacctgtgcacattcgctgtcaatcatctcaaagaaatcattgagctctcgtctgtcataatccagtgaataagatgcatcatggtaagcacgcgtgagtgatattccattgtcatttgccatgctgttcgtttcccctgcgtctctggtgtttccatctttaaatgtgtccttatcaggtgggtcctaattaaattttgaaaattgttactatataattacttacttgtttgttatactctcatggctgtgttattcacacgagccctaatcatcccctcggaatacttttttagcattattactctcctattgagataaaagagtctgaccgtctggatgtattcggaaaggtggtcggcaaaattaattctaaggatgtaccagattaccgtttttaatgaattataatgaaagaagtgattgaatgaaaataattaataatcttaagggaatacggacacagcgaaaaattgcccaaaagcagcttgccgagtgatgaacgctgtgaagataccttagagattgggggcagggggtgactctcatcacaccttgtccggaggggtttaagacatcctcggttggtgtcactgacgaattagtctgtggaactcgggcagacttgcgaagctgctaggaatggtacaaaaataattcaaaaaatttttaaattcgatatggcaatttgcacaaaaaatatccgcctgcaaatcataacaacttcattagaaaaaagacaacttaaaacatctaaaatcatctgttcataaagtactgttgacttgtatattaaaaaaaatcttcaaaaacgataaaacaaacgtttacaacagcattatcaaaatacatgcgatataattcactcaaagctccggagccttaaaaaagtattccaatatgcgcatatcggaatcggaaggaggataaaaaatgaatattttcatcaaaagtggcgcagtccacagtggtttatcaagtattgtagtaaccagcatcgacaatacttccaccacacctgagaaaattgttgattgcgtcaagcaccttatccatcatgaaatggcggatgagcgcgtgcttgtaactcccattgctggaggcatcgaaatccgttacgcagcaaacgcggaacagattaaataccttgaggcaggattaaggagttcctgataattagtgaaagaggcttttttagcctcttttttagtatggaaaatttcaagccatcctccgagaatttcacagacggattgatttacgaaacttgggccgacctgcaaagctgccatgaatggtcatattatagaagaaattctgcatctgacaatgaaaaatcaatgtttcccaaagatttaagaattaatttttaagctcttattatatagaaagctttttttccttccggcttctgacacaattatatatataaatgaatttatagattttgtactgccataaaaattctcgtcaaataatctgtaaaaacttatatggaaagggcagataacagatatcttctatcatacttatatcgaagggaaaaccttattacaaccattttaacgagaccatgagtctcagaaaggacaaattatgaaattcacaaaaaacaaaattccttacaacataagcaaggatatcctgcaggaacagctgcaggaacagctgcaggcatctgctgacagagattgcaagaggcttaactcgcctgcccctacaattaaagtcatcaaaacaaagaatacctgcagggattttcatatcagtaaagaatttaatgatgaaaaagaagagaccgaattaactttcttcattacagaaagatacttaaacaacatgcagacgctttttccgtataagcttgcagtagcactggcccagtcaatcatcaatatgaagtatgaagctaaagccattgaagacggatatagcagtcttgaagatgcccttgcaaaagaacctgaactttattatgaccttgatgttgaaggagatgcatttgcgatttataaactcctgatcagccacactgaccttgcaaattcagttgacatcgtgattggcagagaaccatcgcctaacgtaatcaccatagacaagataaatagagcacttgattttgcaagggaatctgcaaagtacatcgcagacgaaacaaattagttccaccgggtccgggggtaatcccctgggcccggaaacaattaattttctattaaaactgaatatgattttggacaaaatcgcaaagtggagaacaatatatatataaagaatttttaaagcaagcgtaattagtactttttttctatgtatcatatctaaatttttatcatatcattttttttaaaaatatatatttttttttggacaaaattgaataattaaatattatatatgcgtaacatgaaaaattaacgtcaatcgaatgattgacagcacctctatcacacagatagagaatagtccaggaggttaaatctatggataagaaaatcattttaggtgctacaaataaagtagcagcaattttttctcagtatgcaaacaattttgcagtgagaagaaacattttaccatttgtaaaatggtgtcacaaaaagcagccagccggcgataacgcaaagggtgagtctatgtatcatttatctcagtgtctgagatatataagcagcatgcttaaggaaacggacaaaaaacagtcagacgattttcaggagttgtataaaaaatcctgtgaaaatccggagcagcttaagttaatctcagtatacgatgcactcatcagaagttgggatatgataaaggattcaacttatacatatcgttgtctccatgacctcgtgatgctgacaaaaactgaatggaatcttgatgagattgagctcaataatcttgacaagattgaactcaataatcttgatgagattgagctcaataatcttgatgaggatgatgagattttttagcccatcactctaaatcaatgcggtaaatgagaaatcatttaccgcaatcataaaaaagtaatacatctaagaaagggtaacggacatgagtaaaacaagatcgattacagagctcgtaaacgagctccaaagagaaaatgaaagccttacaggactcaaaaaaggcttcaacacaatgtgcaaggcagagtttgatctttccattgaacaaattcataaaatcattgaaaaggcaaatgcattggagcagaagtttagctctgatcaggaaattcaaaagccttactattcgtcacacataagtaatgagagctgattaaaatcagctctctgctgtgccttaaagcacagcaacataaagggttcaaaatgtatgaacatcgctgagcctaaagcgaagtgatgcgaacacattttgaagcggggaatacgtccccgtgtgctctctcaaaagagagcacatcaaggatagagggctataactctgagccgtcagcgaagagttataggtctcgtaaggacagaatgtccttgttagcaagggttagggcctcgcccaaggacagcatggccctgatagagcaagataacaactccaccctattaacaaacgttatgaagggagaaattagcaaatgggtgatttagataagttcactacagatggggtaattcagcttttcaagcataatggacgatatcacaagaataattcaaataaagatatcaatccattaaaaacctgccttaattattcatttactgaaacatctaatgatataaaacaagctgaaaacatatttcatgaagaaataagcaaaagctatttgtatgggcgcaatactaaaagagaagttgacgctattactgcatgcggctgggtattcactttgccaaaagaggtgagcgattattccacgatatcaaaagataatattgcttatattaatccggaaaaagaaaagctttttttaaaggaatatacgattttatttcagcaaggtatggctctgtattttatgatcgcattcattatgatgaagcggctcaaccacatatacatatatattttataccgcgcactaaattagatcatgatttagcacgcttcaaaactcaaagaacaacaaaagtagagcagactgaatcaggtcgatatgaatttgtatacagactgaaaaaggataaatatggcaatccaattccgttaaaaaactatgcaaaaatgactgactattacgatactaaaatttctgcttttgatgtctgcaataaagctgaattacagcatatacacaaaaatttggcggaatttatgaaggctaataatattcctggtgcagattatgtgtatacaggcaaaaccggtggcataaatttttcagtaaaaaccctgaaaaatataacaaaactcaccggacttacactcgatcagataaaagaaatcgctactgaaagaaaaattgaaatcactaacaaaaatgaactgaatacactcgtcaaggaactttcagatactattcagagcaaagactgtgaaatagaaaaattaaagaatgagcttgacgatatgtcacataagctgcaggatgcccaaactaaaatcaaagaacttgaaaccactgtggaaaaagagaaatcatggggcacaaagacatgggacaacacatcatcctggggcacacaaaatactaccattgaggaggaaaaaacatggtaaagaacaaacacatcataatcaaaaaacttatttattatggcattctgcaatatcttgtaatgggagctatatttgcatttatgtatactcctattttcgagtggtgctgtctttcccttaaattaagagaaaacagtagcctgtatccattgattcaatacggattaatggcttttcttgcagcattttggatttatttattttttacaaaaatacgctcacaaagatataaatatctaaccggacggagctatgccaaggaccatcatcaatacaacaagacctatacagaactcgtagagttttgggaaaaatcagacccgtataaaattgatattgaaaagcaactgcctgtcgaagattggcatacagcagaaggagttatactcggtaaagcaaaggataaattcggcacctatcatctattaaagagagacagtgcagctcccggcaatctgatctgtttcggcagacccggatgcggaaaaagtacaacacaggctgctactactgcggcccgatttaatgctgacagaacagatggaggatgcggtgttttcgctatatcaataaaaggtgatctgctcaattttgttaaagataaaagaaaaaatataaaggtcttcactcctgataatgctgttggttcgtgtcactatgatccttttagtggtttatctgaaatgagcctcatcgataagagaacattcgcagaaaatatgagtcagatcatatgtccggatgaagatggagaaaatgctgcattcttcgtagaaggagctcgtgattatttctgctcaattcttctgtatctttgttttatgcatgagacaggaaaaatctccgggcctctcagatttcctgaatttgtcgatgaaatacttaatgacaatgtatttaatataacaatgacaataaaagccagcggatgcaggattgctggggagtataccaactcatacgagggttcatccgaaaaaaatgtaagcggaatatataatcatctcgttaaaaacataagaccatttcacacaggagccctggcggagctgcttgatggcaaaggggactgcattacccctgatgatttaaacagttccgatatctacatagacgtgcctcaggataaatactctgtatatgcccctgtcatcagcatcattatatccaattttctccaggcatttatgagaagacctgacgtctcatcaggagaagaaactgtaccgattctttttcttttggatgaggctgtacagcttaaaataccattccagatacttgattcagcaatgtcaacactcaggtcaaagaaggtaacactattccttctgatgcagtcaattgctcagcttgaagccaaatacggagacgtacaggcaagagaaattattgatttatgctcttatatctctgtatttaacgctcaggatcctaaaagcagagagttttttcataagcttataggtacaagaaaaatgctcaaaaggtcaacatctctctcctcaaagtccgaatatgataaaactgcaggagaaagtgtgactgtagaggaagaatgcatcttcaaagctgccgactttggcgatctgaatgtcacagacaaaaaaggaaacgtaacacatcatgtcctgatttatgcagaaggaaaatatcttctctgcgagacaacaccgtgttaccaataacagtataagtatcaaagaataatagtaatactataattaaaataacaggagaacataactatgatattatcaaaattactcaaaaaaataaaaaaacagcacatgcctgcttgctatttcacaagaaaacaaatgatgaagaaaggacacttttacaagttcattaaaaaggaagttttagacgaaggaaataccttaatatacgaagacaaagtatacatagctccagaagaaggagtatttcacgttatggcaggactggattcagacagaacatatttggccataatatcatttaatgactctaagcttccggacggaaagtccggagaatatcgacaagacaacggctgggaatatttagttaacggctatcatattgaggatgcattcccaatagacagcgagaagttcagattatttttaaaggaacatattgatttaaatgacgagcatcaagtttctgcagcacgaacgcacctgacaagaatcagagcctatcaaacacttgattttttagatgaacttctttaaaaaaagtgcagtattactgttattttttgacagtaatactgctttttatttgggtattagggattcaatcccgaacaagatctgtgctttgtctgacaaagtgcgtatcttgcaaataaatatcagcttcacgaaaaataaagaggggtgattatgctcaaaatatgcgaaaaagaagcataatcgcacacgaatgatacattggtgatacactctgatatattcgtgatacactctgatacgttgttgatacattcatgatacattaatgatacgttgctgatacattgatgatagagctgtttcaaataaaaaatcatgagccagccctgttcttttaccagcatgaatatatttattttttgtctgcagcctgtttaatgaagtgttcaaatgaaagaccttttttccaatgtttccttatcatgtttaggtcaattctgccatataattcattagctttttcaattacatcaagaatctcatcactttcaaatactatatcattattttcatttagcaactgcattgaataccaattatacggtttcatattagctctgatagcattataaacaaccaatgtagccttaatatcctccaggctgtcgtgagccacattatcaaaatcatagccataatatgatgctgcagttgttaatttctgccacttatagttaccataatattccgaccattcaccatatatttcagcgaactcttccatcggatcagagattatagtattaggtttaaacttaacacctgcatttttcaaaaatgcaaaatcaaaactaaaattatatgcaatcatttcattgcaattatcaaagatagcctgtatctcaggtaataattcatctatggttctacaatgcaaaaccatatcaggagaaatatgattgacagcctcagcatccttccattcactatgctgagttggttttatatacgtattcaataagacttttccagtttcatttattgcagaaaactgtaaaagctcatcagactcacgatccaagcctgtagtttctgtatcaaaaatactttttgtcgtttcataggtacacctcatttacatcatgaatatatgtaatatcagttacaagattttttattttgattttagcagagcttgtgtaacatttcgtgtctataaagagattccaacacaagaaagttacacaacgtcctcagcgaagtccgacaatcatcaaacagatacattaattcaaacatgtgtattccgagcagaaaaagaaacaacatgaaagaaaaactatctcaaaaacaatattcaattgtatcacaacagaaagtcagcatgactctttgttttaagcatcatcaggtggcctgtcctcatggtcaacatattctgagcccggccagagaggatgccacaaagaatccccctgtgggtccttgtacataacaagatgcagcacagagtcaaactgatacagccagttagtaggataacctgtaccatcaaaattagtctcaattaaaccatcatagggacattctgtcccagtatttcttataccgtctaaattcactgggtatacaagaaatggttgtatgttttgtggtttcggagttcaccttgaatctccagaatccaatcgttatcaaaaactgaaagcaactcatccaaagcaatatgcctattttattaacaattttggtggcatgatgcgtcagtcgggctgtgtttccgaccttgcggtcagatacatatgaatagttgtgtttatcctgctaacactaatggtatatccattgacttcatagcaaaatttatgtataattttgttatcaaataaggaggtgtttttatgccagcaatcaaatcaagtgctgatttaaggaataattacaatgaaatttctacattttgtcataattatcctgaaccagttttcatcacgaagaatggaaaaggtgaccttgctgttatgagcattgaagcctacgaagaactgaccagccgctttgaactttacagccagatcaaggaaggaatggacgatattgccacaggcaacactagaccattttccgaagctatggctgatatcaggagccgccgcagtcgatgagctatcagattcacatcacttccaccgcagaacacgatattatgcgtgctgcggattatatcgaatttaccctcaaaaatcctgatgccgcagataatctgttagatgctgcgactgagcagataggctcactagccgacctgccacagaagttccgcctggtagatgatccagtactggcaagctggggcattcgttttgtgataatcaataattaccttgccttttatacgattgatgaagaaaagcagactgtaatcatagtccgatttctctatcagaaaagtaactggacttccattcttcgacagggtttttccctcatttaaggaatctgtttttatgcaggttcctttttagtgcattgcattataagcagccacacccgctaccgccagcacaaacacctcacccggtctcattcctgtatgaagagatattagaaattttaataaataaaaatacaaaaggctatgacctgcgaggcataaaatataaccggaattagtattccaagtcgccataaacaattatttttgtcaacctgcgtcgcccaagtcgccaatatttcactttccacgtcgccaataattaaatatggcgacttgagggcagcgtgcagctatttttacaccaaatccagaaaatgagctaaaaaaagagacccataccaaaaatgatatgagtctccaaaaagcctataaaatcaagctttctatttagaatttgccctcatcagcagcctgctgaacagaaacggcaactgctactgtagcaccaaccattgggttattacccattccgataagtcccatcatctcaacgtgagccggaactgatgaagatcctgcgaactgtgcatctgaatgcatacgtcccattgtatctgtcataccgtatgaagctggtcctgctgccatgttgtctgggtgaagtgtacgtcctgtaccaccgcctgatgctactgagaagtacttcttgccctgctcgatacactctttcttgtatgtacctgctaccggatgctggaaacgagttgggtttgtagagtttcctgtgatagaaacaccaacgttctcgtgatgcatgattgcaacaccttcctgaacatcatctgcaccgtaacacttaacggttgcacggagtccatctgagtatgcatgctcagaaacgatgttgagcttagctgccttgtagtcatactgtgtctctacgaatgtgaatccgttgatacgtgagatgatctgtgcagcgtcttttccaagtccgttaaggataacacgcagtggtttctgacgaaccttgtttgccttctcagcgattccgatagcaccctcagcggctgcgaatgactcgtgacctgctaagaaacagaagcactctgtctcctcctcgaggagcatctttccaaggttaccatgtcctaaacctaccttacggtgatcagcaactgatccagggatacagaatgcctgaagtccctctccgattgctgctgcagcgtctgctgctcttctacatccttttttgattgcgattgctgcaccaactgtgtatgcccagcaagcgttctcgaaacagattggctggattttctttacctgatcgtaaacatcaagtccagcgtcctttgtaattttttcagcttcttcgattgagctgataccatagctgttaagtacagcattgatctggtctattcttctttcatatgcttcaaataatgccattgtcgttctcctttcctcttattcctgtcttggatcgatgatcctaacagcaccctgctctggagttacacgaccgtatgatcctgaagctttctcccaagctgtgttagcgtcatcaccctttttgataaaatctgtcatttttccaagagaaacgaactggtatccaattacttcatcgttcttgtcaagagcgattcctgttacatagccctcagccatctcaaggtaacgaactccctttgcctttgttgcgtacattgtaccaacctgtgagcgaagtccctttcctaaatcctcaagtcctgctccaacagcaagtccatcatcagagaatgcagactgtgtacgaccgtaaacgatctgtaagaataactctctcatagctgtattgatggcatcacaaactaagtctgtgtttaatgcctcaagaattgtcttaccctgtaagatttctgctgccatagctgcagagtgtgtcattcctgagcatccgatagtctcaactaatgcctcttcaattactccattctttacattgagtgagagcttgcaggcaccctgctgtggtgcacaccagcctacaccgtgtgtaaatcctgaaatgtcctcaattttcttagaatgaacccattttccttcttctgggataggagctggctcatgttttgcgcccttagctacaggacacatgttttcaacttccttagtgtaaatcatcttaagactcctttcgttatggttttaacatacccgatttattctctcatattttttgtcataagtctagtgtatcatcgacaaaaaacaacaaaaatacaatattttttcaaacaacattactattttttaagaactacgttgtccttgtccttaaaaatgtggtttgcagggatgactccgcgtactcttgaaagcggataaatgtttgaatttcttcctattactgttcccggattgagcactgagttgcagcccacctccacatggtcaccgagcatagcgccgaatttcttgcggccggtttcaatctcctcttttgtatcgtaaacatcctttacgactacaagagtcttgtcactctttacatttgatgtaatagagcctgcgcccatatgtgatttgtagcccaggattgaatctcctacatagttgtagtgtggcacctgtactgaattgaagatgattacatttttaagctctgtggagttacctactactgagccctttcctacgattgcactgccacggataaaagcacactgtctgatttctgcatcctcgcatatgatgagcggaccgtgcagatatgcgctgtcaaatactgttgcactctttgccacccagatatcctcgcctcttttctcatagatttcagggtcgagtgttggtccgagctccttgatgaaatcacttattccggcaagtgcctcccatggataagtgaactgtgataaatactcctttgcgattgtttcatccagattatagaggtttgttatttttgcgttttccatttttctatgtcctttcttttatgtaaaaattattaactattactttaactgtcatttaaatatttaagccacaataataatgttaattatagatttaataattaattatcagcagagctactcaccgaacagctcatgcgcggccgcaagtgccgcctccgacacatcatctgcctgtgcactatcagctgccatatcaaatcctgccagaaattcctctgggattcccatctcatccatggttgtctcatccggcgcatcatctgccgtgctctgtacttcagcattgttatgtgcatcagtattgctctgtgtatcagcattgttatatgcatcggcattgttctgtgcatcggcattgttctgtgcatcagcattgttatatacttcagccgtgctctgcacttcttcctcgccggggttatcgaaatcaaataatatctggtcattttcaaacttaaggcatgtatcgaatacatttcccgcctttgaggtgaagcctgtgaccttctttttggtctttcctgtggtaaacagctccgtgagaatttcctctgaaagctccacctttgccacagtatgccaaacattgaagccgcactcacattcatatttccactgtgactttttgagaggtctgccacactttggacagagtacatttgtctcgattggcttaggcttttcggggaaatcaaaggctatatctccgtcctctgtgagctttagcggcgcatcaaacttcatgcctgtctttgagacaaatcctgatataacttctgtctttttctttgccagaagctccttaaggactgattcctttatcttgacgcttgcgaccttgcccaccataaatcggcagctctcaggatcatcacgtctgttgttctcgcatacaaagccaaacggcgccacctggattttgcctccgcacttcggacatactacatccttcactgtctttggctctacatggtcaaaatcaaactggacagagagctttttgttttcatcctccttaagcaccaggcacgcatcgaagcgtttcccgcttttggatttaaagcctcgtatggtctcggtctttttatcattaagaagctgctttaagtttgcggctgtgattgtctttcccgcaatctgtcccaccgaaaagcggcagcttcccggctcatcacccttgtagttcacacagccatagccaaacgatgtcttttttatctgaccaccacaaagcggacagacgacatcctttatgatttcgtcctccacattgtcaaagtcaaatgctacgacggtgtgcattttctcactgccctctgtgacaggctctttctttaagacaaggcatgcgttgaaacgctttcccgattttgatttaaagccctttatcgtctctgttctgccgtttgccatgagctctaaaaactgtacctgtgacagctgcttgtctgctatccttccaacgaagaaatggcagccatcctctgtctgtctattatagtttgcacatcggtagccgtatggcgacacatatatatcgcctccacagtccgggcatacaatgccctcgaccttttgcggctttacattttcaaaatcaaaggtggctgataccttgttcgtctgttcatccttgttgagctttaagcatgcatcaaagcgtttgccgctttttgacttaaagcctctaattgtatcggtgattccatcctcaatcagctttttgacctgttcctccggaatatccagtcctgccacctgtccgatattaaaattacatcctgatttatcatttttgtaattggcacaaccgtagccaaacggtgtagtcactatctcgccgccgcaaaccgggcacttgacacctatctttcgtctggccgctgcacctcttgcatttttgcctgcaaagctgctgatgcggtctgcaatctcagggcgcagattctgctcaatcatcttttctgtctctttgcggataaagctctcaagctttcccctgtattcccagaaatccaccgtgccccttgtaattccgtccagtcccttttcccagttggctgtcatctttggattaagaagtgccggaactgtcatgtatacgacctcaaacaccatctcgccaaggctttcgggtgtgagtatctgtgtctttttgttcagattcagatatcctatacggacaagcttctggattatctccgctctcgttgctgatgtgcctattcctgagccctttatctgctcacgaagctcctcatcctcgataagctgtcctgcattttccatggcaagcaccatggagcctgatgtatagcgctttggcggagatgtcttaccaaacttgatattatagccttggcatgctatctcatcccccgcctttagcttatcggcaagctcaagcatcaccttgggatttacgactatctcatcattgctgccgtttgctgtgctgttttcatctgtactatctgcagtttcactgtttttaccaagtattcgtgcgtttgattcctcaaacgacttctttttcggcggattcgccacctgtaaatagccctcgctctttagtacctttgatgatgcaaaaaagctttccttatccacatctacaacaagcttcacattctcatactctgccggtggataaaaaatactaaggaaacgcctgacaatcagctcaaatactgctctttgaagcgatgtaagccccgaaagctctgtaagctgacctgtcggaatgatagcatagtggtctgttaccttgctgtcatccgtgtactgcgtatcagctatgttggcatatagcctcttttgcataatatgctccacaaagtctgctgtcggttcaaaacctttaagcctgcttatattttttccaatctcctttgccacagcgcttgagagcaccctggcatctgttctaggataggtggtgagctttttttcatacagatcctgagccacctgtaatgtctcatcagggctgattttaaacttctttgagcactctgcctgcagctccgccaggttgaaaagaagcggtgctctttttttagtaatattcttaactatagatttaactttcgcctgtttgccgtttaattcttcaattaaagcaagtgcatctttttcctctttgaaaccgttttccttgtataaaagcggtgattcaaagtaccttgagccttctacagccttccactctgcctctacaccggcatccgtaaacctgccgattaccctgtaaaacggagtctccttaaagtttctgatttcgcgctcacggattactaccattccaagcacacatgtcatcactcgtccgaccgcgattgccgtgtacgagcgtgtacccgccgcatcgtttagcagattgccgtatttgaccgacatgacacgcgaaaagttgatgcccatcgcataatcctcgatggtacgcatgatgccgctctttccgaggtttgcatacgcactcatcggctttgcctcttttatgcctcttaggatttcctcctcagtctgcgaatctatccagactcgaagctcctccatgccttccctgacaccaccaaagtttctgatattctcctcgatggtctgtccttcttttccggcatcacctgcccagtaaactctgtcaatgtcctctctctgcaaaagagcgtgcacaatattgtactgcttgcgcacgctgtctatcacatcatatttgtattcctttggcagaaacggcagatcctcaagacgccatttcttgtatttcatgtcgtatgactcagggtagaccagcccgaccagatgtcccacgcaccatgaaatcacatattctccattttctatataaccgtcattgcgtccgctcacccgcagcaccttcgcaaattcctgtgccacggatggcttctctgttattatcagtgattttcccataagctcctctataattcattcatgttgatgagcttgaatctagggtctctgaccacatagctttgcagtgcaggctcaaaatctgttgccgaaaacagataatagtcatcagatgtaagccttgcctgatccatagccatagccatattctcgcacatatccatagtcatcattggcttgtcccagttgcagaagccgatgatgctccttctatcctcgctctgagccacgatgtctatgcggcctgtctttccaatccatgtacccacacgctttatggtaaacggaagctgtcccatctgatttaatataagcagatactctgtgcagacctccctgaaatatctctcaagatacgcatcaagctctttttctatatatgtatcataaaactcttccggtgaaagcagatacagattagacatattcggatagacaaacttaaaccagaaattaacaaatgtgtcttttatctgatatacgcctttctttgcattttcccatccaccggtctcaaatgaaaccaccttttccacaatattgaagttggcaagattttttaaatatacgctgattttggcacgcgaaaatcctgtcgcatggaaaatatcattgagcttgttctcacctcttgcgattgctgcaagtattgtgctatatgctgaaagctctcgaagctctgcggatataacagcatccgcctcaccatacagtgctcccgatggtgtcaatacgagcctgcatatattatccttaaaggatttagctgcatcccacttatccagatatgccggaactccaccgattgctccgtaaattctcacgatttccgcaaccggaagactttcaaaatgtcttacaacctcaaggaaattgagcgattcaagcttcatttcggctcccttaaactgctctgctgcctcttgtgtagcccagactgtagatgatgtggcaagtattataagtacaggtcccggatacagcttgtgctttttaagctttgcaactgcttccataaatgatgtatccctctttgccacaaactgtgcctcatcgattatcacgacaagcttggaagggtctcctgatttgattctcgcgaagtactcctcatatgtctgtctgctcaggctcaccttgtactgacggcttatctcctcccccatcatctcaagctgatgctctggcgatgcctgtctgcatctgtagtaaaagaatttctttccgtcacaaaattcctttatgagctcctccttttgacagcctctccttccgtagagcactacgagctggttgcccgactctttatagagctgctcaagtttctccaaatctgtgtgttttgctttcataaatattcctccaaaataatcaactagaaatattatatcacaatttaacacatatacaaatagattttaattataatttccgagctcctattgtagctttcactttatttctgacaaacatatagcagatagcctgcatgatgattgtcgctatccatgaaccgggatatgatataaacaggaaaaacagcgacctgtggcttggaaacagaccatatatccagatgattctgactccgactgttcctattatagaaagtatcataggtacagttgagtatcccattcctcttagtgctcccggaaaaaggtccatgattccacacaggaaatatgggattgttgtaatcgaaataatctcaagtcctgatttaattacctcgctattactagtatatatgccaagtatctgtgttccaaatatgtatgaagcacttcccatcacaagtgctaccgccgtcgtgaggaacagacagtctatcagtaccctgtccattctcttttgttttcctaccgcatagttctggctcgtgaagctcatgcaggcctgtgtgattgagttgacagatacatacaaaaagccaagtatattgtttgccgccgtatatccagccattgctattgagccaaaggaattgactgatgactgaagcatggcatttgagatatttatgactgtgctctgtatgccggccggaattcccacctgaaatatctgaagcatatattccttatcaatcgcaagcttattaaagcagagcttatagctggtatctgctttgctcaaacaatataatacaagtacgctggaaacaaactgcgaaacaattgtaccgattgcaacacctgcaacatccagtttgcacactattacaaaaaacagattgagcagtgcattgatacagcctgaaataatcaaaaagataagaggtctctttgtatcaccgacagcacgcaaaattgccgcaccatagttataaagcataaaaaacggcataccgcaaaaataaatcctcatataaatagtagaaagacctatgacatcatccggtgtacccatgatttccagcgcaccccttgcaaaaataacaccgaccacacccatcacaataccacttatgagtgcaatcataatagcggtgtgcaccgtcttagacatctcctcatccttgcctgccgcataaaatcgagcagcgagcacattcgcaccaagcgatatacccataaacagattgacaaacacattgataagtgccgtagtcgagccaacagccgccagtgatttgctgccactaaactgtcccacgacaataatatccaccgcattgaatgccagctgtaaaatacccgaaatcataagcggcaacgcaaacgaaataagcttatccattattgaaccgttcaccatatcaatttcatacttattattcttcacttatatctacctcttaaatatattctactcagattatctattttaccacgataaaatataaattcaagcgtaacaaaaaaagagagcctcttttaagaggctcgacttttgcataataattaattcacagagtgaggattttccgttcaacacactgccttcaccggagagtacacagtatgttccgaagaaaaaatatgaactgccacgggtttccaataggttaaatgcccacatagacctgcaaactgccatagcctatccataaaaaatcccgtggctgacttcatattttatctgaggaatactactgtgtgctacaccggtgcccacagcccacaaacggaaaatccgccctccttaataaattttccagcaaattgctaaatctacttctttgtgatgtaaccctgtgccttaagaagctctgcacaaagcactgctccacctgctgcgccacgtactgtgttgtgtgagagtcctacgaacttccagtcatagactgtatcctctctgagacgtccgacattgatacccataccatgctcataatccacatcaagtgcaacctgagggcgattatcctcttcacagtatctgatgaactgctttggtgcgcttggaagcccaagctcctgtggtactccgctgaacttctcgagtgcctcgatgagctgctcctttgtagggttctttctgaacttgacaaatacagctgctgtatgaccgtttaatacaggaacacggatacactggcatgtgataaccggtgactctgcaggaacaatctgtttcttctcatcatccacatatccccagagacgaagtggctctttctcagatttttcttcctctccaccgatgaatggaatgatgtttccaaccatctcaggccagtccttgaatgtctttccggcacctgagattgcctgatatgttgtagcaacaacctcatatggctcaaactctttccatgctgtaagaaccggagcatatgactggattgagcagtttggctttactgctacgaagcctctctttgtaccgagacgctccttctgatatttgataacctccatgtgctgtgggttgatttcaggtacaaccattggcacatcaggtgtccatctgtgggcactattgtttgaaactacaggagtctctgtctttgcgtagtcctcctcgatcttcttgatctcgtcctttgacatatcaacggctgagaatacgaagtcaacctgtgaagcaacctcttctacctcattgacgttctttacgatgattttcttaactgcctcaggcattggtgtgtccattttccatctatcaccaacggcgtcctcgtatgtcttgcctgcacttcttgggctggctgcaattgttgttacctcgaaccatggatgattctctaaaagagaaataaatctctgtcctaccattcctgttccaccgaggatacctactttaagcttttcactcattactctaatctccctatcttctagaatttcttcgaccatgtcatacactatactttgacattaaaatcaggttttgtccgtctgtcgcgtacaactgtctttatagaaaatatattacttgaaactctaatgaaaaacaaggaaaaaactatattaaattaataatttttcttcctgttttttataaaatatgcacaaaaactacacttcatcctgccaatttgacttcatatactcgtcgtaaacggcaattaccttgtccattgatgtctttgatggtgctccaactgtacaccttgtgctgacacaggtctccattgaaatggcatcaaatacatcctcctcaaataccggagagatagccttgagctcgtcgatgctcatatcgtcgattgcaatgcccttgtcgatgcagtaaagcactattcttcctacaatgccatgtgcatctctaaacggtacaccctttttaacgagataatcagctgcatctgtggcatttgtaaagccattgtttgcactctttctcatcacgtccttgttaaacttcattgtatcaatcattcctgtaaaaagtgcgatacatccctttgcagtgtcgaatgcatcaaatgccagctccttatcctcctgcatatccttgttgtacgcaagcggaatacccttcatggtggtgagaagcgacatgagcgcaccgtatacacggcctgtctttcctctgacaagctctgctatatcaggatttttcttctgtggcatgattgagcttcctgtgctgtacgcatcgtcaatctcaacaaactggtactcgtttgaattccatatgataatttcctcagaaaaacgtgacagatgcatcatgatagttgaaagagccgataaaaactcaatcagataatctctgtctgacacaccatccatactgttaagtgtcggtccgtaaaaatccagaagctgtgctgtatagtccctatcaagcggatatgtagtgcctgcgagtgctcctgagccaagcggacaatagttcattctcttatatatatcgcacagtcttgatctgtctctcttaaacatctcaaaatatgcgcccatatggtgagccagagtgattggctgggccttctgcagatgtgtaaagcccggcatgatagtctgtgtgttttccttcataatcttaaggataacagctaaaagctccttaagctcattatcagtctccttcactgtctttctggtgaaaagacgcatgtcaagagcgacctggtcgtttctgcttcggcctgtgtgaagcttctttcctgtgtcaccaagcctgtctatgagtgtagcctcaacgaagctgtggatatcctcatactttgagctgatttcaagctcccctgactctacctccttaagtatctgctttaggcaagccactatatcgttgctctctgcctgtgagatgatgccctgctttccaagcatcgtaacatgggcgatgctgccctctatatcctctttataaaacttctgatcaaatgaaatggacgcattgaaattgtaaacgagctgatctgtctcctttgtgaaacgtcctccccataactgtgccatgagattcctccttgattattaaatgatgatttattttcatgtatcacaatgtattatatgaaaataagatgtgataccgccgcctgctctaaacagccgctttactgtgctaaattatataataatttttgctgtcacgcaaccacattttcacccacgtgctgcaatctctctgtcacgctgctccttggaaaatacacagccgcagtagtactgcctgtacatatcatactgctttgatatctccgtggactttttataaccctctttcttcttaaaatcagagaaaagatatcgcactccatattggctctctaagtcttttcctatctcattgagcttttcggcattcttcaacgggctgatggaaagtgtcgtagtaaaaaaatcaaagccatgctcccttgcatactgtgcactctcctcaagacgcagcctatagcacttaaagcacctctccccgccctcaggcacagcctccatgccgcgtgccatatcgtaaaagcgcctggtgtcgtacacaccctccacaaagtgaaccggatttttcaccggaaactcatctataaagcgcttctgctcctgtgctctcatgtgatactcctctggcggataaatgtttggattgtaataaaacaccgtcaccttgaaatactccgagagcgtctgtatgcaatacgtgctgcacggcccacagcagctatggagcaaaagacgtggagtgcagttattgtccatgcaattttcttttattaaatcttccattaatttttgataatttattttgtttgccatattatattatttctttctcaaaattcaaaaatttttgacatatccccaaatattatttcagataactattctgcatatttacaattctgattaattactatttctgatataagctgcataatacgaacaagggccggaagtctcctcccggcccggctcatactaatcctcttcttcatatccgaacattagtctaaaaatcttttttcctgtttcagtcttgaatatacgcttgtatgccttgtcgattgcacggtttcccgcatcatcctcatacagatttacgaggaaatcagcctcaacgagtatctgataatcaagaccatctatattgtcatatgtgtgatggtgacctatgagaaaacaaattctttcaactatgtaattctcaaagccaagctgtgagagcatcttctgagcgattatcggtccctcctgctcctgaagctttccatcgcacctgccatacttctcctccgccacacgtatgccaatatcgtgtgtgtaagccgctgcctcaagtataaagagcgaggcatcatcaagctcctctcctataccgataagccttgcatagctgtgcaccttggtgaaatgctggattctctttggatcgccatcatagtaggcaatcatatccataaacaagtcgtctaactgttgtttactataactgtcactatccatttaatatatttttctcctgataatatgttaattagtcgcattgccgactttgcaccgacaatgataacatactacaaagcgatcattttttcaatatttttacacaaatatttcttatttttttaaatcactatgttgtttgtcacgctgttatgtgggaacagtaacatcactactttgcatcacggaaaaatcccctgaatgcgaattctgacaaaggcttcttgtaaagcagctctcctatcaatatctcaagcgctccacctgcaaaaatagcaatatagcctagcaatgccaccaccgggagtccaagcttaaaaacagcattagaaaccggcacaaacgctgctcctgaaaacacagtaaaaacgcccataaacaaaaccatgaatacgataaagccaagtacataatacttatagcatatgcttgtgtacagatatactatcagcagtacaacatcaatcgtaaaaagtgtgtagataagctgcgtcttatctgccactccatactgtatcagaatgactctttctaccaccagaaatgtaaaaataacaagattgattaccgtgcttgacatcaccggaatgtatatctgcagcttctttttcagtgatgtggactggataagctctgatacatccatcgacatgatgagctggaatgtgaacataccactcatcataaagtatatcccgcctatgattgtagttcctttgctcattatatcggatgcaattccgattactgtaaggaatacaagcatgatcacattcaacttcagtttgtagccatatctcaataatttaaatcctaatttaatatctttcagcataatatttctccttttcaagtatacttccaatttaaaatgcctctacacatcaacatatgatctgcggatacgcaccttcatatgataatatgtcgctgctatcactcctacaagcaccactgctaacacaggtgcgataaaccaaatttttgcgccataaatcaaaacagctatactacccgcaattgccgggaagataactataagcgccagcagataaatatacattcccatatccatgtatctgaatatatttaatgagccaaccgaaacaattgaagatatcataataatgtcaaatatcgaccagatattaactccaaatttaataaatggtattgaagcaatgagtattgtaattccaatacgcagcggtcttacaagtatatccacaagaactgcattctcaaagtatcttactccgttaaaacctgtctttaaaaaatgcatgccaaatgcattcttcttgcacatacagccaaagcagaaatagtcctgcaccacctcgcacatcatataaaaatcataaacaattactataactcctatccatgcccagattgttttcgaacaggcaattagcattgatgtaaaaattgctaaaaacggaatcagtatatttgttataagacgatacttgagattagtcataacacggtaatccctgatgtatgttagaacttcattctttgctttgttatcttttttattaattgttctttcagtatcatgttcctgtgaaaccattttttcattcatacttcctgacttactttccataacaccttacctcgcactagcgcatcacaatctttgtgttatttttcatgaccgcaacgcttatctggtaaagtgtcggaatctcctttgtcacattaagtcctgcaagcttatctatgttttccgccaagcatatgccctcaaagccgtacgggtttttggtcattgaataaagcaccttaccggcagcctctgtatctgctgcatcgcctttaatcaggatatatttttccttcaaatcctcaacaaagccctgctccacaatctgtccgttttccattataatggcataatcggtgatattttccatatctgaaatgttgtgcgtagagaaaaatacgctgcgctttccgttgccctcatggatatactcgccaatcatctggcacagcttatctctcataagcggatcaagcggcgatgccggctcatccagcaaaagaatgtctgtctttcgcgccatgacacctgccagcatgagcttcatcttcataccatccgaaaatgaactgttagctttcttcatatcaatgctgccatgtgaaaatattgcaagttcctcacaatatctgtgaaaatcatctgctgaaaaatcatcaaacatcagcttgctgatttcctcgatatccttaactgtccactgtggcagatagtatttgcccggtcctgtgtagcctatgcggtttttaatatctcccgagttttccttctgtttatcagaatactgtccgaaataagtgatttcacctttatagtcaagcctgattcctgccaggatatttaaaagtgttgtctttcctgctccgttttctccgattaaggctgtcgcaaagccctgtggtattgcgaaattctccacatccagtgtaaaatttttaagttcctttgtgatttttgctgcctcaattgcattctttgttgtcattttcattcctcctgactcgtttcatatctttatttatccacctcgagcaacgcctcaagcattcccttaagctcgtcgtttgagattcctgctacctcagctgcggctatcgcgtctgtcagcgactcctccaccttgcgcaggtgctgttcctttatcatctcactgtcctgtgcattgacataaaagcccttgccctgcgccgctgtgatgagtccctcatctgcaagctgctcataagccttcatcgtggttatcacactgattttcaagtcctttgccagccctcttatagacggaaggaactccccctgctcatacctgccggccaaaatatctgtcttgaagctgtccgctatctgctgatagatgggcactcctgaattttgcatcagcttcatatgctacctccgtactgtatttattaactgttcatgtgttatatatacactatatacattttaatgtcaatacctttctataattatctctctaaagatttcacctcaaaattttgatttgacatacactcttatatctgataatataatatagcttgccgatatggctcagtaggtagagcgacgcactcgtaatgcgtaggccaccggttcgatcccggttatcggcttcatacataaaaaacacctcattcaaaactgaatgaggtgtttttttattacaaaaaatccccttgacatttataaaaaatatattaaaattatctcgttggtttatttttagtaaacaaaaaatctattattaaacctacagcaactataacataaaatgtaattagaaaaggaagtaaacatggatatcggacatcgtatgaaggagcttcgtatccagtacggacttacccagcaggagcttgctgacagggctgagctgacgaagggatttatctcccagctcgagcgaaatcagaattcaccgtcagtcggcaccctgcttgatatcatccagtgcctgggtatgacaccggcggagttttttacagattcggaacctgagcagattgtatacaaggcaaacgactattttgagaaaattgacgaggaaaaaaacagcaaggtggaatggatcattccaaacgcacagacccgctccatggagcctgtcaggctcactcttcatccgggcggcagctctgaaatatatctgcctcaggagtgtgaggagtttggatatgtgataaagggcacagtgaagctttgctatggtggcaaggtgcacaccgtaaaggccggtgagtccttttattttaaagccggtaagaagcattttattgaaaataagtcttcaaaggatgccatgctcatatgggtcagcaatcctccaagcttctgacgcttcacctgcagaagctcttttatagggctgtaattactgccggccgcatttttagtgtgtacagcagcaaattataaacatacaggtcctaccagtactataattacatgagaaaggtttacaccatgggaaagaaattaattgattttatcgatatcacaaagtcatacaacggcaatgttgtactcgacgatttaaatctatacatcagggagaatgagtttctgacgctgcttggaccatcaggctgcggaaagaccaccacacttcgcatgctcggtggctttgaaacaccggacaagggaaaaatcatgtttgattcaaaggacatcacaaatgtgcctgcaaacgagagaaatctgaacactgttttccagaaatactctcttttccctcatatgacaatagctgaaaacatcgcgtttggtcttaaaataaagaaaaaaagcaaggcttacattgatgacaaaataaagtatgcattaaagctcgtcaatctcgacggctttgaaaaccgctctgtggattctcttagcggaggccagcagcagcgtatcgctattgcaagagctattgtaaacgagcctaaggtactgctgttagacgagccgcttggcgctctcgacttaaagctgcgccagagcatgcagtatgagcttatccgcttcaaaaatgagctcggtatcaccttcgtctacgtcacacacgaccaggaggaggcgcttacaatgtctgacaccatcgtagtcatgaatcagggctatatccagcagattggcacaccggaggacatttacaatgagcctgaaaatgcctttgtcgctgactttatcgggcacagcaatatcatcgacggtgttatgataaaggataagcttgtcgagatactcggtgtaaagatgccttgtgtggacgagggctttggtgagaacacgcctgtcgatatagtcatccgcccggaggatgtggagctggtgcctgcggaggacggctacatgcagggcgatgtcgtgtcaaatatcttcaagggagtgcactatgaacttgaggtaaaggctaacggctacgactggatggtgcacaccaccaaatatgtagaggtcggcagtcatgtgggtatcagggtgattccatttaatatccaggtaatgcacaagcctgagtcctcagatgaaaaggcggtggagatagatgtctaaaataaagaaacagctgctcgcagggccgtacctcatatggattatcggatttatcatacttccgcttttcatgattgtttactatgcatttaaaggctctgacggaggcttcacatttgaatatgtggctgcaatagcacagcacaccaatatcaaggcactgcttttatccctacggcttggaatcatatgcaccataatatgcctggtgctgtcctatccgcttgcgatgattttaaacggcttaaagattaaaaaccaaagctttgtggtatttgttttcatgcttcctatgtggatgaactttatgcttcgaatactcgcatggaagcagcttttgtccaaaaacggtgtcatcaactcgatactcaccactctcggactgccgggcttcaacatcatgaatacctccggagcagtcgtgcttggcatggtctatgactttctgccattcatgctgctgcctatatacaactccatgaccagaatcaaaaacgactggattgaggcggctcttgacctcggtgcaaacaaagtcacaatacttttcaagattatactgccacttacagtttccggtgtcataagcggaatcgtaatggttttcgtgccatcactcacatcctttgccatctcacagatactcggtggcggcaaggtcctgctcatcggaaatatcatagaacaggatttcgtccatggctcgcagtggggcgcaggaagcggtctctcactcgtgctcatggtattcgtattaatcagcatggcactcgtcaatctgtttgataaggaaggagaccagagcgcattatggtaaaaaaaatagcattcagggtatatatgggactgatttttttgtttctgtatctacctatcgttgtattaatagtactctccttcaacaactccaaatccaaggttaaatggggaggcttcacgctcgactggtacataaagtgctttcagagtgagcggattatgtcggcattttctacaacactgcagattacgctgcttgcagctgtgatttctacaataataggaactctcgcagccatgggtataagcgccatgaagaaacgtaaccagacaatctatctgggcgctacaaacatcccgatgctcaatgcagatatcgtgaccggtatctcaatgatgcttttgtttgtaaaattcatgaatctgggctttgtgacagtgcttatcgcacacatcacgttcaatatcccttatgtgatactcaatgtgcttccaaagctcaagcagaccaacaaatacacctatgaggccgcacttgacctgggcgcatcacctctatatgcatttttcaaggtcacctggcctgaaataagccccggagtgttctccggctttatgatggcggtcacaatgtcactcgatgacttctccatcacctactttacgaagggtgccggagtaaacacactctcaaccatgctctacacagagctgaaaaagggtgtaaagccggagctgtatgctctgtcaaccatacttttcttcacagtgctgctgcttttggttgtggtaaacatcaactcaaaccggatacctgtcagcgcatcaaagaagcctgcaagggctaaaaagctgcgcatcgtaaagcgtagtgtgagcatcgcaattgttgcagtactcgtaatcggctgcttttcggtatttaccataagcgccggaggcacgaacaatgacaatgccataacagtgctaaactacggtaaatacatcgatgaatcagtaatcgacagcttcgagcaggaaaccggaatcaccattaaatacgaggaatacgaggaacctgaggagatgtacacaaagtacaagtccggtgccatcgattacgatgtcatctgcacctctgactacatcatcgagaagctcataagtgaaggtgaggtcagcaagatagactacagctcaatgccaaactatcaaaatgtaaatcaggatataatcgacatgtccgcatcctttgacccgacacatgagtatactgtgccttatttctacggcacactcggcatactatacaataaaaagctggctgatgcatcagacctaaatacctgggactgcctgtggaacggcaaatacaaggacaacatgattatgattaattctgtccgtgatgcctttactcccgcccttcgcacacttggctactcgataaacgagacagacacaacaaagctcgatgaagcatttgatatactaaacaaacaaagcagtgatgtgctcgcctactacgtggatgaaacctgtgatgagatggttgctgaaaatgcagcaatcgcagtgtgctactccggtgaggcagctgccgccatggctgaaaatgacaacctggactatatcgtgccaaaggagggctcaaacctctggattgactcatggtttattccaaagacatgcaagaataaagagggcgcacaggaatttttgaattatatctgcagtgatgagccggcacaactcaactttgaatatgtatactatgcatcacctatccagtctgtcatcgacaaccaggatgcagaaacgaaggaaaatgaggcgattaatccgccttccgatatgctcaaaaactgtgaagtatacagagctttaaatgatgatgacgcaactctttacaacacactgtggcagaggcttaaatcggattaaaaatgaattgcgcagctatattttgtatgatgtcacaaaaatgaagtctaaaaattgtacaaaaatacatattgcaaacttcaacaaacaatgatagagtaaaacccacgaagcgccctgcttcgtgggttttacttttccacgagatccgatatttttatgctccgcaaggagattcatgaaatacacggagtttttacatactatagaaacagaaataaccgcaagacttgacaataatttcaagcttaccatccatcctgtcaaaaagaacaacgggatgatctacgacggattggtgattatcaatcccaaattcaatatagcaccgactatttatctcaatccttactaccattggtatcttgatggtgtatccattgattctattctcgatgcaattttatccacctacaatgatttcaagccaactgaagattttgacataagcttctgtgatgatttttccaaggtaaaggagaaaataattttccagctcataagctacgacaaaaaccaaaagcagctaaaggacgtgccctatatcaaatatctggattttgccatcatatttgaagtatatgtaggagccgagctgcctgaatttggcaccattacggtcacagatgcgcttctgtcacgctggggcatagatacagaaacactaatccgcgcctcaatgcaaaataccccaaagatacttccatgctcaataatcaacatggcagagtttcttgccaaaaaatgtccgggctatgctaatcagatgcgcgcagtctgtgattttgacagcctgcctatgtatatccttacaaacagcaggcagacaaacggggcatccgccatactctacccgggtgtgctaagctcgctggcaaaaaagctcggcggcaatatgctgctcataccaagcagtatccatgagtttctggtaatgccgctggatagcgatatagatgtctgcaacctaagcgaattcatctgtgaggtaaactctacagaggtacgcgacgaggaagtacttggcgagaggtattacatatacgatagtaaaacagacactgtctactgataatcatataacctgataatcatataacccgataacacaaaataccggatatcatatcatagatatgtatccggtattttactttctaagaacatagttggaaattcaagaaagttattggcctgttatttgcagagcgatgtactagttgccaagcagcatgtcgtaaagcttctcatactctttcgcagatgccttccatgagaaatcatgcctcatggcgcgctgcatcatctcctgccatctgtccttatggttttcaaacacatcaagagcatatttgatgacatgcagcatatcatgcgcattataattagcaaaggaaaagccatcgcccgtattctcgtactcattgtacggcactacagtgtccttaagaccacctgtctccctgactataggcagcgtaccatatcgcatagacatgagctggctcaagccgcacggctcaaaaagagacggcatgagaaatgcgtcacagcctgcatatatctcatgtgcattttcctctgagtaaccgatatatactccaagcttctgcggatacctgccatggaaataattaaacatctcctcgtactgctgctctcctgtgccctgcactataaactgtacattcatggtggaaagcatctcctccatcacatatgccaccagatcaaagcccttctgctttgtcagacgcgaaactattccaatcagcatgacatccttatccacagccagaccatacttctcctgcagctgacgcttattaacgacctttccactcaattcccttacagaaaaatgcttatccagatatgtatccttcataggattaaagacatcataatctataccgtttacaatgcctctcaaatgcctgcgccgctcaagcatcaggccatccaggccctctccgccctcaggtgtacagatttcatctgcatatgtcggactgacagtcgtaatctcatctgcatatactatgccgccctttaaataattagcctcaccatagaactccagctcccctgaattaaaaatatgctccggaagtcctgtaacatcagccacctctttaatcttccatcgcccttgaaacttcatattgtgaatggtaaagactgtcttgataccggcatagaaattgtctgagccgtatactgtctttagaaaaaccggcaagagtcctgtctgccagtcattacaatgtatcacatccggggcaaaatctataaccggcaaagcctcaagcaccgcctttgaaaagaaagcaaacttctccacatcctcgtatatattgttgtatggcttatctcctgcaaagtaaaactcattgtcgacaaaataatatgtcacaccatcatactgcgatgtaaaaatccccacatactgcctgcgccagttgagattgacataaaaatgacagacgaacttaagctgtggcagtaatttatcatccatacatttgtacttcggaagtataactctcacgtcatatctgtccttgtcaaaatatttcggtaaagatcccactacgtcagctagtccacctgtcttcatataaggtattgcctctgatgcggccattaatattttcattttgtccatgctgaaacctcccccagattacagttatttaaacaacgattaatctgataaaaaatatagtatacatcctgaaaccaatagaatgtatactatattatatcacgcgggagtacattttgcctagtaaatttatcaaaacgtggttttatttgtctataatgacgatttttacatccctagacgtattttgtctgtaatcagggcaataaactccgaattggtaggcttgcccttaccatagtttacagtgtatccaaacatggagtctatcgtatccatcctgcctctgctccatgccacctcgatagcatgccttatggctctctccaccctgcttgaggtagtcttgtacttctttgcaatagtgggatacaaaagctttgtgatagagctaagcatttccatatcctcaacgcacatcactatcgcagtcctaagatactgatatccctttatatgagccggaacacctatctcatgaatgatatccgtcacctgtgtctcaagggattttttctccatatatgtatcatcaagtggctcagtgtcaccggatgctctctttacatacacaagtaccacatcagaaccggcattaccgtttatcatgttgtatgcttcatcactacttcttgctgttcctaaaaactccatgccctttaataaactctgcatgtttttcttttcgtctgctactgcaacatttaaagtgctcatcaaactctcctatgccgccaattactgtcatgtcaaaacaaattgtatgcttttatgataacacattttgtcgaattttgtcgagagcgtatttttttttaattttatgtaaccattcagcccacgcatattcgcaaaactgcacgatacccgtgctttctctattcttcaaactgagagttatacagctctgcgtaaaatccgttctttgcaagaagctcatcgtgtgtaccctgctcgataatgtctccgtccttcatgacaagaatcatatcggcattcttgatagtagacagcctgtgggcgatgacaaagcttgttctgcccttcatcagattgtcgagtgccttctggatacggatttctgtacgtgtatcgacagaggatgtggcctcatcaaggataaggattggattgtctgcaagaatggctcttgctattgtcaaaagctgcttttgtccctgtgacacattggatgcatcctcgttgagctccatatcgtagccacccggcaatgtctggataaagtgatgcgcatgtgctgcctttgctgccgcgatgacctcctcatctgtggcatccagacggccgtagcggatattttccataatggtgcccttaaagagccatgtgtcctgcaataccatgccgaatgcatctcgcagatcggctctgttgtaatccctgatatcatgtccgtctacaagaatggcacctgagcttacatcataaaatctcataagaagcttgaccatggtagtctttcccgctcctgtcggtccaacgatagcaacctgctgtcccggctttacctttgcagaaaaatcattgatgatgatctggtcaggattataaccaaagtgtacatgcgaaaactctacacttccctcgatatggtctggctttacaggattttccactgttatatcctcttcctcctcatcgaggaactcaaatacacgctcagatgcagccgccatcgactgaagctggtttgccacctgcgctatctgctggattggctgtgtgaaattcttcacatactgtataaatgcctggatatcaccgattgtgatgacattctttatggcaagtataccacctgagatggctactcccgcatatcctaagtttcctacaaactgcatgataggcatcataagtcctgaaaggaactgtgatttccatgcggatttgtagagcacattgttggcctccttaaaggtctttacagtctctgcctctttattatatgcctttatgacgaggtggcctccgtacacctcctcgacctgtccgtttatgtgtcccagatactcctgctgctgtctgaagtatttctgtgaatgctttatgacaaacgaaataagtatcatcgaaacaggcaggataacgagtgaaatcagcgtcatgagcggtgaaatagacagcatcatgaccagtgtaccgaccaaagtggcaacagatgtaataatctgtgtgatactctggttcaagctctgtccgagtgtgtccacatcgtttgtgatacgcgaaagtacctcaccgtatgtccttgattcgaaatacttcatcggcatacggttgattttgctcgtgatgtccttacgcatcctgtagcaggtcttctgcgtgatgcctgtcatgataagcccctggacaaacataaagatggcactcaccacatataaagccagcgtaaacaaaagaacctttgcaatataatcaaaatctatgccgcctgttcctgcaatcttgttcataagtccatcggcaagcgcagtggtggctttacccatgaccttcggtcctgcaacggagaagacagtcgaaactgctgcaaatatcataactgcaatgatggcagcccagtatctgccgagatactttatgagtttctttgtagagcccttgaaatccctggccttttctgtgaccattccggggccacgtcccattggccctcttggcctcttaggaggcatcttaaactgttcgttattattctcactcatcttacatgccctcctttttgttatcatcaattccaagttccctggctgaaagctgtgactgtgcaatctgcatatatacatcgcaattcttaagaagctcctcgtgggtgccttttcctacgattttaccgtcatcgagcacgagaatctggtcagcatgaataatcgtgctgatacgctgtgccacgataataacggaagcactctctgtaacctctgctaaggctgcacgcagacgcgcgtcagtcttcatatcgagtgctgaaaagctgtcatcaaacacataaatatgagggtcctttgcgatagctcttgctatggcaagcctctgcttctgaccacctgacacgtttgagccgccctgtgcgattgagctttcatacctgtcattctttgtctcgataaactcagaagcctgtgcgatatccgcagccttttttatctgctcatcactcgcgtctgctttaccaaagcgcaggtttgaggcgatggttcccgaaaaaagaatacccttctgcggaacaaagcctattgactcgcgaagctcgcttagtgtgtagtctctgatatcgtgtccatcaagctctattgagcctccagtcacgtcatagaaacgcggaatcaggtttacaagtgtagactttccacagccggtacttccgatgatagctgtggttttgcccggctccgccacaaaatcaatgtctgaaagcacatcctcctttgctcccggatatctgaaatccacatggttgaaacggataacacctctgtgatcagcctcagtaacaggctcttttggatcatttacagtgctgtttgtctttataacctcatcgatacgctctgccgcaacaccagctctcggaagcatgatggacatggctgaaagcatgaggaatgacataacaatcatcatggcatatgtaataaacgcagtcatggtacctacctgcatggagccattgtctattctgcctgctgcaacccacacgataccaagtgtgatgcagtacatgatcatggacatacccggcatcataaaggtcatgacacggtttgtaaacagctgtgtgcgtgtaagctcacggttagcctcatcaaacctcttttcctcctccttctcacggccgaaagccctgataacggaaagacctgtaagaatctcacgagaaacaaggtttaccttgtctacaagactctgcataatcttgaactttggcatcgcaatgccaaccagtgtgaaaataaaaaccatgatggcagcaaccgcaatggcaatcacccactccatgccggatttggtctgtgccaccttgatgataccaccgataccaacgattggcgcgtaaagcaccatacgaagcatcatagtagtaaccatctgaatctgctgtatatcgttcgtgcttctcgtaatcagtgatgccgtagagaatttgttaatctcggcatttgaaaaacctacaacctttgaaaaggtcttctccctcaaatccctgccgacagcggcaccgacctttgaagccgcaaaacctacaacacatgctgctataagcataatagctgcaaaggctgccatcttggcgcctgccttccacagataagcaacctgattggcatccacgtcgattcctgcattctcatcacactttgtcgcaaaagttacacccatggactttaaagtagctgaacccaccgcatcgattttttcctgcaccttgcttcttatctgctttatcatgttatcatcgagcgctactccctgcgggatagccgatgcatccacatccatctgctcacccgactgaaaagcctgatatgccatgacaagaggaaccaaaagctcctcatccagcttatcaagtgtgtccgaatcagctgtcagcttgtattttgccacaccgtcatcagattttgaagcatcctctgcctcataacagtccgtaaatttttctttctcgtcagacagcataaatgtctgtgccatctgataatcctccgatgtaatctcctttggcaggacatgctcaatgccatgatcctggatacccacatcaatgatgtcagatgtgtacgcaggcaaagccagatcacaataagcctgagcaatgagaaaaacaaaaattaatatgatccatcgccagtatggaatcagattcttgaaaattttactcataaatttttcctttctttccggttaatttatcccccatccacgaatgcaaaaaatatccgcaatcgtgcgcatactatttattttatcaataagcgcggataattcaataaagaaagtataaagaaacagtaaaaaaacagagactatataaattgtttatataagtctctgtttgataaattgtgcttaatcgaaaagtatgtgatagctaggagcctttgaaaactaatccaaatctgcaagacctacacgctgtatctggaaggtcttgtatgcctttgctgttgtagtttctttatcaccaccgctcacctgtgactggtaaatcttactatatcctacggcataaatctttatagaattagctccctccggtaaaacactcaatggtacctttaccttatatgtcttgttattttcaaagaagtcccttggatccttatttaattgactgttttctttactgttatttatctgttcattttctgttccatcattattcagtgtatagatatcccagtccaccttctttaagtaaatcttatcatttccggtgccaatcgtttcatcatttggatttttttgcggatcctcgatataaaaatccaaataaacaacagttttttcatcaatctgatttcgcacaaggtttgaatcctttaccgtaaaataaacatcctgcgtactgtctgcaccatctagtctggcatccgctttattagctgcttcttcttcaatggcatcatcaatagttgcatataatgtagttatgtcatttgaatcagtatctgcattctccttaagataaattgacggctcatgaactgatgcactatatgcagcaatcatagtgtttatataaagtttcaattcatcctcattatttgagaaatcggaatgtcctacacctgagtatgttacatttcccattgtgtaaatataataattatttcttacatcctttggagactggtcataaactccatggcctgacaaggtataccatacaacaatatcactctcaccatcaccatcagcatcctgattcatatccagctggtagtactgcttatgagtggtagctatatttatttcgtcatcaatcttaaaaggatatgtggtaatctgtcctgaattaaccttgactgccttattagtcttagcttcaacatcttcattactttcataattattaagccctgaatacagcctgtactcgccatgattgttaccatcatctttccactgaaaattatttaaatccacataagtaaatccctgattctgtctgacaataactgaattatcggattttggctcatatgcaatatcagtgttattcttttcagcggtctctacagcttttgtaaaatccgaatcagtactctttaatgtattgcccttctttaaatactcatttgacaggattccatacctgtccagtccgacagtatcacgaattatagagttaaacttatatccccagacattattatatgtagtatcatttttattattacaatatgatgttgtatcatgagcaaacagtactggttttcctgactggatataggcttttattttatcgagatgtttatttgtattatcaatatcataacaatcaccaaatccaataacaagcatatcgtatgtctgcagcttattacatacctcatccattttatttacgtcatcataataaactgtttctatatccaggtcaaaatccttcactttattaagtaattcatgaaactttgtattgccattcttctgtgtctgcatatcaaaatttcccttaaagtcctgattatgcttcaagtgtgaattaatctgaagaatcttgacttttgtaggactgcctttggaatttttgacatacacatatccggatttctgatcatatctgtagctatttgtagcctgactcacacgaagctgccaaggcataactcctacaaatccattcggcaaatcataaaccagtttataattataattgcctgcattcagactatacatatatttaccatcatcacccattaccggattcacaatagtaccatcacaatataattttattttatttgcagctattccttcattggttgtcgaaaacttaccatcagaatttgaatccaagaacagctgtgcattaaaacttgctttggaatcagcaccgcctgcattgtttattgaaaattccaatgtgatctgattattactaatctcaacataatctgtatcttttactttttcctgctccttgagtactatttcaggtttttcagtagtcaggtaggtaacaagctccgctggctcatttgacttattttttaagtttccattgttgtccacttcaagaacattgtctttaccttttgcatattttaaaaaattaaaaatatttgaacagttatcaatgtaatcctcattaattccactttcatacttgctatccttgctgaaaaagccatctgaaaagacgacaggaaagcccgcctttatataatcctccaattctgaaaccttctgcttagtaatatcattgcctgagcctctgtatgtgtttggagcagttaaataatcagcattatttccatttcctcttgatgtaatctgagtattaagcgcctctccattatttatataatcagtatccagcaatcccgcatgaccattcctgagcatatcataattccaatagtttaccctataatttggatctataacaacaatgtcaccaacatttgaatatttaagcccatccatgttccaatcattatatactgtatgaccatctctataattcagattatcggctacgagtcccatatatatcatgtcatagttattaaggtcctctattcttccaataaattctgcactcgtaacccttgttatcgtaaccttttttttctccgggcatcttgatctaagccaattttttagcttatcataatttaaagcgtcagactcattttttacagttccgggctctatatccagtatgttcagactatctgtcggatttataatgtctctcttatcagcatacgatatgatatagcttaaaactatcgcctttgaaatcttcttgtcataatacgcatactcgtcctttccaagagtatcattttcttttttcctgcttgtattctctgagttgatgtactctgctatctcgtcaaaattctcatttttagctgcttcgacaaatttagtttcatctttatcttcaataaacgcagaagcaaaatcatctcttaaaacaaatggtacatccttatcaggattatagtttcgtggaatgacatattcgttgccaattacatagccatgtgtatgagttgaactgtcaacttggtaatacgttatgacattgttatctttccagctaataaaattatcagctgagtccttggtaaaattcaaggagctgaaattgttacagctcaaaaggcctgcaagctttttaatgttgctatcatatttaatgttgctatcatcctttgtacttggacacacaataccattatccactataacaggcatcatgataccactctggtgcacgcgctggactatctgctttaccttgtcccatgaaatgtcattatcagtattatatgttgcagcatcgtttcctaaatcatttgaaaggacggactttgagcctgaaagatagagtaaatcaattgttgacacatctatctgctcaagctcctctggtgtgactgtttttaccttaaaggtcatattggcagtcttatcatcatcaccagtcttgccctcctgattgaacacacctgttctgaaccagttattgttcttgaaaccacccttataatatatgtgtggagtatttacaggataatcaagcgagccgtttttatcagcctccattatatagtcaccttttcccttacccatataggtgtatgtctggctgtccttaactatatcaaaatatccgtctgtatcagtgaggattacctttcctgtgttacctgccggctgattgtccggtgtgccatcatctatcttctcgtatggattctgtgagtcaagcactgctccatactcgccggtctcatcgtaattaaactcaataggtaccttagtatccacctcgtagtaggtctcgtcatcagtgattttacctgcaggcacatactccatctcaaccgtgcagtatgtatacttctcataatccggcttactgccatcaggcagacttgccatccggtcagctcttgcaacaaattcatatggtgatgtgatatctgaattgtcttttctgtaaatatatgcctttgggtcatattttgctatgttttgcatgccctcagcagaaccaatggcatatgcgctctttatagaataaaccacatgcttgtctgatgtgtcatctgctgtgcctgtatctgtcgtattgtctgtgctgctatcgatattaccatctgtaccgctgtctgtatttccatcagctttctgtgaattatcagtctctaccagatacttggtatttgtcatgccatccggcaattcgactgcagtaaatgcaacactgtagtagcctctttttccgggtgccttaatttgattgccattttcagtctctgtattagagccatctgcggtacttcctgtactgcctgtattaccggtactacctgtatccacagattcagagccatcttctgtctcatcctcgccctgcatgaaaacataatggtcaacattctgtctgtaatgacctgtaggcagtccatcttcatttacagcaagctggtaatcagtgttgaacttgtagtcacccttctcctgctttgtcatcttgtagccttcggtgccctgatttattttatccatatccacaagggcaagctcactccagtcattgccctgattgacataactttcctcatacggctcatagtaaaggggctttgtgttgtccttttcctctgtagtaataggcgcaagcttttctttcaggcttttcatataagcagccctattcgttgcaccttttccctctgtgtcagacatctttgacagtgtaccaaaccaattgtcaggctcctgaccatcaatcagatagccaatggatgccattttcttgtcaggcaccacctccactatattgaagggcttgtccttgccatgtgagctgactatatcagatattccattgaacgctacatttgcatcgacctttgttaggctgtcattcagcacaaaagctgccacaacgagacatcctgtaagtgtgagcgatattggaaccactattttttttcttaatttgctcattgcgattgctcctttgtaaaaaactactttgtttaataatatgtgtaaaacgtaattgtatttgacttaaatcccgactcttcctcaagtccaagccagacgctgatatttaatttttctccgacaaaaaaattttttccgagagtgatatgcattttttcattttgattaccatctacaatatgataattaagatagttcctatatttaggatcatcttcatgaccttctgctccggtttctccggcaatctcctttgaactaaacttaaatattccatcaggctcaccattgccatcaggaccataaatcagcttaccatcatcgcccattttaaaggatatatctcccttgtactcggttgcacccgttgagctgacactttctacctccatatgccatacaaaatccttaatctgatatttgccatttaatgaagatttttttaactccccttcatcaataaacaattgatgcgtctgtcctaaatcgaaatgcttatctgcatcacaatgcagaatattgattggatgtgctatgtttacagttacctttgccgtcaatgacggatcgtctatggatgttacggtgatgactaattgatctgtagtttcatcgctcatcagttgtacatcatatacatcaccattagcattaaagtttccaccatttttgtttcctgaatgatcccatgttacgttttttgaatcatactttccaccaagtatcttatcagtaaactttaaattattattcgttttcttcatctcatagtatactgttccgttggttacatccttgcctttgtaatatatccttattcctttaggttctgccggtgccacatactccacatctgccccagtcggcaccttattgcgcatagtgaagttctgttttgatgtatacttcttgtcccctgccttaaagtccacgacaattccgacagaattcttgctttctgcctcgcttaaatcaggtgtaaagcctgtgacattttctgccataagagattccttgccctgaccatccgccttcaccgcaccagttgcaggatccagtgtatcctttcgcagatagattttgtgctctgatggtctgtatatgatatagtatgtacaatccttgttgtaaataatcagcttgctgtcggatgatgtttcttcggatgacgcttcttccgctgatgcagttgcaatataaccggcctcaggggctgccgatgccacctccaccggcgctgccactgtagcaggctcatacttaacgcccttttgcgcatcaattatcaggtctcctatctgattcatggtaagctgtgcctcatactgtaaatctacgtcctttgaagcgtacttatactgcttcgtgctcgtaccgataaagcctgcaacagccaggcccagtattcccattatcgccatgacaatgacaagctcaacaagtgtaaagccactgtttttcctattatttgatttgttcatgcgccttaaaagtttcatggttcatcttcctctccgatttcatcatacaaccttataacagccttgcgtcaaaataaaatattcatcattaaactatgtaaattactcacataccaccttgccggtctccttgtatatcgtgataaccttttcggtgctgtttttttgaatccagatacggctgcagcacttaccattggcatcaggcttttgtgcacctgagcttctgtcaaactgaagcactatactgcctgaactgttcaattgtgtcttatcactataatcatccttcatggaataatatacatcaatcctgctctttcctattttgctaggagcagatactgtaccatttatggtcgtcttataatagtaggcaccatctgatgcatccttatatatctcaagaactgcgctgtcctttcccatagtggtgacccttgttttattaattatcgattcaatatttctggcacactgcttcacctcaacacccatgaccgagcgaatggatatggttgccgcacctataagtacgacagatatcgctatcactactataagctctaccagagagaaaccgccattattctttttttctgttacagacatattggattcctcccttgtatatatcgtcaaaatttgccaaatataaatatttcgcagctgttttgcgccttaaaagccgcttgttttctactccttggtccagttctggtatgtaatgagcgtagcataatctatttttgtgtccgcctctttcttatttgaaaaagaagaaacattacccagatagttggcaccgtccatgaacacatcatacaggtgcagtgcatcgtctgcatcacttaccttttcaagaagcaatgccttaaatacctcctgagtaccattatcaatctcgcactggtctttgtttacaattatcctgccctttgcaactatggtacctgtaaagtcagcattcagtgtcacatctcccgtagcaacaattatatccacattgtgtgatttgtcatttgcatcataggtgtagttaccgtttttgacaattgcctggtatttttttccctgatactcagtctcaaatatatgtttattaccggaatttggcactattttcagcaaattggtattgttaactatatttgtaaaaagcgaaacacttgctgcatttgtcggtaaatctgcataatttgtcaaaagctttgagtttagtgcagtatacgtgtgctgtaaggcatctgactgtgcatccatgtccacaccatcagctatgcccttcaaaaggcttaaattgctgccatcgtagatgctgtaattgccggcagtatagatgcttgctgcctcatttacctttatgctgtcagtatagaacttagtgtatctattgagcttgtcactgtctgcgccaaaatagtctctgtaatactcagctgccttgttcgttggcagatttacataatagtatacaagtccatcatcactattatcagtagaaggaacaaagaccttctttatacagttgtcgattgtctttttctccggcagatatgccgagagagacttacctgtctttgtgctgaccacattagcattaacttcagtatactttgtctgatcctgtccggttgccgtgatatccttgtactccttataggaaagtggattcttgttgtaaagcgatttggcatccgcaccatctccacttgtgcctatgcactcaggcggcacaaggtatgctatctggtcaccctttacagagattgactcacccatgcccacattgctgttttgtgtacccacactacttgagtttacaatagcctgggtattgatatatgcggttcctactaacataagctccctgatatttgacatatcaagagatgcctccctgccgtttatgataatagcagagctatcgcctgcgacaggattttccttgtcagcacctccgttgccaaagccgacgtacttcgcattgttattcttattattcttgccaagtgtaacctttgagcctgtaccctttaaggtcatgtcatctgccacatatgtcatgccatctaaattgactgttgcaccatttacatttatgttgcttgtccacagctggcactgtgaatcaacagaaagtgtactgttattgtgtacccccgccatattcttttttattgtaccagtatcttttccggcaaagtctcccacctctatatcgccctctgcaatcatatagctggtatcctttacatcaagtgtggcattgtttggaatggtaacactcgtagtagaagtccctgtgcctgccgcattttcacagccggcgtagagattaccggatagattcactttattaagtcctgatataatatccagtccttcatttccgacaagagaatatgtaaaaagctccggaactcctcccgatgctgtaaagctcatggatggaactcccagagaaatatctgtttctattattgatttaaatcccttttcatcggtatactctaccctgatgccattaatgactgcgcggctgttgtataccttgagcagtccatttccattttcatcggcatttaccgccttgaccacagcgtgtggctttgagttttcgtctgtgagcttactatccacatagtctttaagcttttcagttttatagtgcataccggtattgtcagactcaagacttccctttaagctctttaaatactcctgcgcaaatatactctgtctgccggcctcatttatgctgctgtcagagtaattctccataacctttgtatatcctgctgagtaagccttggaaatatctccctgcagaccggtacatatctgatccagcacaccctctgccgagtaaaagttgtctgtatttttttcgtccgtcaccttcatctggaggttcataagcgctatccacagcacagtcacagctaaaacagccactatagccattgcaactacaaccatcacaaaggaagcaccacggttatcattacgcttcataattaataccccatgcttccggtcatcgtaacaaccgggtctttatccttaaatatatcatccagtgaagccttgctctcgtatacagccaccttcacatcatacagcctttcagatgcattgctttttgtcagattctttatatcgacaattgcctttacatcattctgaattacattgttattaaagccatatatagcttgatcgggctgtagtggattatccggtgctcccatatttacattcagattggtggctatatgagtataagcatgacctgtacgatttcccggctcacttaccttcacatatgccttatatgtactctccttcgtgctcaactctgactgatccgatatagtcttttgctttacaatgtttaccgtgcagtccagcttgtccttattattgattataatgacatcgttgcaggtattgtaaagtgttcctgtagatgtgtaccatggattgtaaaacagatagacattccttagattatggttcacagtatctgaagaattatcataaatcaccatggtataatcatccttcagtgcactattcggatccggaaaagtctttcttactccattcttattgatagaatatgaatacgacaccgtaaccttggtagccttattactcgaagctccatacttttctatatctatggtgatagttcttttgatatcctgctgagtgatgccgcctacaccaggcatattattaaatgcatacataatatttgtagcagaatacttgtctgcactcatgcagtcaaaatttgcatccatggccgacatatccgctacctcgtccatgttgtactttttaaccttattgtccgactctgcgtccgattttgcatccactgtcacaagagcattgtatttctttgtgcctgactgcacaccagacatatagaaataatacttgtgcgcatccgactccctgaaattccaaagcgatgtatcgcttattttggctgatgcatcagtcttgtggatacagctagtgatgacatcgtccttgtttacaatctcagcactgatatcctcaagcctctttacattatcaaacttacccgacttcttaagaagctcacatgcactgcttccatctgatatattaaaaccgtccgccacatcaaagccctccgacggatagttaaactgatatgccagtgtcttcatggagttcttttcaataccctccataatgtttgtcgccagatgtgtagcattcatctcgtttttagcctttacattggtctttgtagctgtgacaaatgcattcaaaaaaggaagcacgattattgcgagaatagcaatcgacacaataatctccacaagtgttactcctcgatcatcgttttttagctttctcaaatctgcttcctcccctcttgtattttgttatctcataactcaataatctaacatttgatatttatcacttacggtctcaataacccgctaatctaataatctaatattataataatcagttagtttgttgtaccaaacagattatttgtaccatgtggtactgcaggtatgtatggtgcctcatatggcttatcaagtccatacaggaaatatgaatccacaagcatctcgcctgtcagcttgcctgtcgaatcatcaaagctcacattgagcgtgctgatagttttcttctgtgatgaaccaatcacctcgccgagcatagccttaagcccatgatactctgtcttgaatgccataactgtgctgacatcataaagctgatagcctgtaaccgtagactttgcagagcctgttgatgtactgccatcagctgcactgccgtcgcctgtctgtgactgagagctgttgccatcagcggtctgagagctctgcgaactgtctgcattactgctatccgtggtactgctgtctgaactgcttcctgacgaagaatctgtaccggcttcaccggtcggattattcacatcaatagctgtcggtgagccgactgtaagctctgtaatatttgtattggtagatttctcgatagcaaccgcatccatgatgccgttttctatctgtaaatatgaagggaaattgtcatatacctgctgcatggcatcagacatatcctttgtcttctctgtgtagtcatccgcctttgccgcaagtgctgaaagctgattgtactgtgatttcagattcatattttcgctcttgagtgaatccctcttattggactgtggaataaaaatcaaaaaatatgtcagtgctaaaatggcaacacccgctaatataataagtaactttttatctctcgttgacatcctaacaccccctactgatttgtactgtctgtatctgatgatgaattactatccgtctgtgcctgtgatgacgcatcttttgatgtatcatctggctcactgcctgtgccatctgccgattcagaagcagcactgtcatcagcctttacatatgtgcaatctactgtgaactgaacctttgaagcaccggtctcatcaacctcctctgtaatggttgacacattggataccatgatactctcaaatgtacgaagctgtgcaatcacatcagccgctatatccttgctgcctgtctttatggtcatcgaaacaccatcagtcgtaacagacatattcacaagcttggcctctgacggaagcttctgctccagctcatccacgaagcccgttatctcatcattcttgttggatgaggcgctctcaagaagcttagtccagtcatagtccttcttggtctggttgtacacatcatatatattctgtgcatatgacaaatcagaaacacgtgctttaagcgtcatattgtctgaagttaaaacaagatttgaaaaaatgctgtatgccgtgataccaactgcaactaccacacacaatccaaaaatgagaagctgcaccgcaaaagaaacaggcttttctgcttcctcccctgccggtacgggaagaggcttcccatcaggaccgacaggtggttttccctgcatacctgcctgtgcaccgccgggtggcatagcacctgcagctgttcctgccataatcggagcaccgattcccttgtttttcttactgtcaagtatatcaagcgggctcaatgaacatccgacacagttgaaatactctgccagctttgcctctgcgaggtttatgctctttgccacatgtatgccgtcaaactgctggagcggaaccaccttgacattgagctcattggtcaaaagctttgaaagtccgctgaaatcagcacctaagcctatgaggaaaattctctcaataggagtatctgagtttctcgactgatagtagtctattactcgtccaagactgcttatcagattggaaagtgcatatgaaacattcagacgaagcttcttaaagcgctcagaatcaatctcatgccccataggatccatgccgccgcccgccggctcatcaggtactgtgccatcaggccttattgcaaggcaggtctttctgcgtgccacatcaactgcatcggtaaatgacagatactctccaaaaagctcactatcctgaatcgcctcaatagcatcagcaagtccatggttgacattgcgctgcagctttaccatgcttccatccattacagtcagtgtggtagaaacctcatccaccttgacagtcaccttcacatctccgggaatctctcttctcatgagctgcttgatggcatttccactatagtcaagtgctacaagctgcagcctgcaatcagctgcaagagcaccatacgacaaaataagatcattaggcacagcaataaccgaaagacgtaatttcttttcttccggtctgtcaatcttctctataatctgatgtaccagcttgtactggctcaaatccaccggaaaataatccgatgcattcattgcaatcatttccttaagctgtttttccttaacaagcggaagctcaatatctctgcttgctatacgcgctgaatttaaaacaaaaacagcttttttggtggaaatcttcttttccttcagcttactgtataagatagaacgaaacatcccatccggctgtaccactccatcatcaatcatccccggtggtgtcggaaagccgaacatattgtaaatcttgggattttttgctttgtaatcaatctcaactactctggtaaggttctcccctatttcaataccgagtaccctatttgccataacctagtcctccgtgtttatctttgttttacactgtatacatctgtaaaacattcgtaactgttcagttacaaacattctatatatatatttcggcatatctgtgttttctctgcttttgtctcactgcttgtcgtactacctgttttatattaagtatgctatattataacacgtttttcaaaagcctgcgagtgtcaaatatgccgatatcattttctcaccccatagcatcgaaataaatattccggctgccaagtacggtcccatcgcaagcctgttgcctgcgtttgttactttcatacgaatcagatgtatcacggaaccgatgatgcatcctaagaaaaatgctaatgtaatattctgccagcctattgcaaggccagcacatgccatgagcttgacgtctccgccacctatagctcttcctccacttacaagaagaaggatttcaagaaataaactgacacaaaagaatcctatcacatattcagaccagttatcatggtctaaaaacacatgcaggattccaagcaccagtataaatatattgattccgaatggaatttcatatgttctccagtctataacactcagaactatgagtgcagatgtaagaaagcagtagatgatactcgtgagctcaagtccatttactgcaaaaactactatgtataatataccgtttaacgcctcaataatagggtattgaggtgatatcggttctttgcacttgcggcatctgccacgaagaaacagccagctgaaaaccggcaccatatcgtaccacgcgagctgatacccgcatctcatgcagtgggatctttcggtcaccactgtctcatgctgcggtatgcggtagatacagacatttaggaagctgcctataactataccgaatgcaaatattaagatgtagatgggtatcagttctgtggtcatggttaaaagcctctttatatattatttatgatttagggccttttttgaactgatctttgtctgaatggtaatatggagaatctcctgtatatgtaatagttccgtctgccttattatatacaattgttattttatcaccagtccactttgtgcctttaattttcgcttttgttaatccggcatctttaacagccgtatcagcaactgttcctagctctgtcttacccaatgtaacagtaaccgtagtagcagtagccgaagccgcaacctcttcgtctgcataatatgtctttaaagctgtagcaatattatcacatgtttggatatctgtagcctctctagacttctcaacatacttgataagctgtggagcaagtacacctacaagcactgccatgatggcgattacaacaataagctctacaagagagaaacctttgttgttcttctgtttctttcctaactttttaaatacattctttaccatagttcttttctccttttcattataacatggtttttgtgcaaagagctgtgccctatcagcatctctttggtttgtatgcgctcattgtaccataaatcaaagcataatgcaagttattttctagtacaatagtatcattgctgtataatttttttcgccttttttagcaattttaaccaaattttaaccgatttattgcatttaaatcatattttttcaaagaaataatctcctgggctgtattttggcacagcgtgaggggcttcactccatgtgaccggctaacgcatacactctcgtgagagctacgctacactgccaagatactgtaggaattatgcttttagattttctatgcttgacgaaaccgtcgaaacgcgccgtccgtgacgcggttctccttgcccattaaaagtgcctctacgaggcaggggctgtaatctgacaatagttgatttattggcgcatagcttgacagcgtggtgtcaagcttgcgtttgaacagcaacgatatattacatcccagtggcagttcatttctgtgtttcatgcgcataattcaacagtatctaagcagcttcgctattcgctcacccgagagtatattcgccagccgttcgtagagaataaagccccatcctactgtcagcaaaagagaaagcaacctccgggctctcgcccaaagattgcttcctctaatttacatttcactacaatattagctcacaagccatttttttacagtttcctcatcaaaatccacacattcagctatatcttctattgagtgtccttttttctgaagttttaaagccgttacttttgcctgacgaattctgccttcttctctgcctaattctctgccttcatttttctgttcttcccacgccttgcacatatcaatcacctcttctttctcatctatgtctatattcgttcctgcaaacaggttgattgcctcgactgtctctctgtccacattgctaacttctcgtcattctgcagcacttcctgcattttttccttatcataagcattctgtaatacctcgaaaagctgcctgattgaggttctgaatcctgtaaagtcggttatctccctcggagccagcaggttaatcctataatccggtatgaatggcagaagctcctcgtccacatcaccaaacatatctgacagcctccttggtccatcccattcctttgtcccgagatacactgtaatcgtaattactggaatcaacttatcctctttcgtaaatcccgagagaaattcatcagaagttgcgatatccttttccctgcggtgctttttggctgtttcctttacctgattgccatatgccatgacatcataaaacatgttttttaccggaatggaatagtgtatatccgactgattttctactcctatcagtaccacatatgatttgccggtatatttgatgctggcatttttgaaaatatccctcagcttctgcaccgctatggtctttttgtcaagccccagtgcggtcagcacctctgtcgtgtccctttccttaaggttttccggcaggatgacctctcttcctccatacagtatattgttgcacaggtcagcaaacctggcattgtcagcaaagtattcctttgccattgagtcttttgcgctcaatccttctcctcctgttctcttgtgtgagcaggaaaatttggtgccaatgagggtatagtggtacagtttacaaggtatacctgtgctgttcttctttaatatttacgcacggtatacagttcatccgccttttgactacattttctgcattctgtctacatacggcatttcaattttcctgctgttgattggtaaataaagcattgaaaacttccatgtcctttgtagaataatgcgaagtggtctgccctcttcaaagtggtgcgcacctgaaaaactgttatgtggtgccgcttacagaaatataatgctttgagttgattgtagcatagaggtggtgttttgtcatcacattttttcttttttgccacagcgtaaggggctttatcccatgtgaccggctgggcacactctcccgcgtgagcgaatagcgaagctgcctagatactgttgaattatgcacacgatacacagaaatgccctgccacggatggcagggcaaggagaaccgcgccacggacggcgcgtttcgacggtttcgtcgggcatcgtaaatctttaaggcataattcctacagtatcttggctgcgtagcgtagctcacgtgagagagtgtgcacaagccatggctcatgggatgaagccccgtcctactgccagtacctacagttgctatgccagcttcttatttttctcaagaagctcatagattttctcaacatcataatccggcttcattgacaatgccgcttcgtaaattggagcgataacctcctctttttcttccaggtcatctgctatctctgccacactcttgtccttttgcagcttttttacaatctgagaaattatcttttgtctttctcctaattctcgaccttcttctctgccttcatttttctgttcttcccatgccttacacatatcaatcacctcttctttctcatctatgtctatatccgttcctgcaaacaggttgattgcctcaaccgtctctctgtccaccttgctaaatttttcatcgttctgcagcacttcctgcatcttttccttatcatacgcattctgcagtacctcgaaaagctgcctgatggatgtcctgaatcctgtaaagtctgttatctccctcggtgccagcagattaattctgtaatccggtatgaatggcagaagctcttcatccacatcaccaaacatatccgacagcttccttggaccatcccattcctttgttccgagatatactgtaatcgtaatcaccggtatcagcttatcctctttcgtaaatcccgagagaaattcatctgatgttgctgtatccttttcttttcggtgcttttttgctgtttcctttacctgatttccatatgccatgacatcataaaacatgttttttaccggaatggcatagtgtatatcggactgattttctactcctatcagtaccacatatgatttgccggtatatttgatgctggcatttttgaagatgtccctcatcttctgcatcgctatggtctttttgtcaagtcccagtgcggtcagaacctccgtggtgtccctttccttaaggttttccggcaggatgacctctcttcctccatacagtatattgttgcacagatcagcaaacctggcattgtcagcaaagtattcctttgccattgagtcttttgcgctcaatccttctcctcctgttctcttgtgtgagcaggaaaatttggtgccaatgagggtacagtggtacagtttacaaggtatacatgtgctgtccttctttatgttttctatatgtttacattatgattatcacactgtatacagttcatctgtcttctgactacattatcgggcttctaactgccctctggctgcactttctgtattctgtctacatacggcatttcaattttcctgctgttaatgggtaattaaagcattgaaaacttccatgtcctttgtagaatgatgcgaagtggtctgccctcttcaaagtggtatgcacctgtaaaaaattgttatgtggtgccgcttacagaaatataatgctttgagttgattgtagcatagcggcagttctttgtcatcataattttttctttttttgccacagcgtaaggggcctcatcccatgagaacggctggtacacgctctcttgcgtgagcgaatagcgaagctgcttagatactgtcgaattatgcaaacgatacacagaaatgagctcccacggatgggagctcaaggagaaccgcgccacggacggcgcgtttcgacggtttcgtcaagcatagtaaacctataaggcataattcctacagtatcttcgcagcgtagcgtagctcaagcgagagagtgtgcacctgcctgtctcgtgggacgaagccccgccctactgtcagtcccctcagacaaagaggaagcagcctccgcgctttcgctcaaagactgcctcctatcgatcttttttcaactacagctgctatgccagcttcttatttttctcgagaagctcatagattttctcaacgtcataatccggcttcatggacaatgctgcttcgtaaattggagcgataacctcctctttttcttccaggtcatctgctatttctgccacgctcttgtccttttgcagcttttttacaacctgtgagattatcttttgtcgttctccgatttccttaccctcttctgttgcaacctcttcccagtaatcactcacattacacatctcgctcatcctcccttcgagttccatgctcattttaagtccataatcttcttcaagtatcttctttttctcgataaactctgactttgagaacagctcttccagcattcctatgagtttattcttagactgctttttattttttgttgctctcgtccggacatttatcagtgcaccatttaatttgtcaatctgtggtattttctttattttaccataaatcaggctggatttcatcccaaattcgattattgaatcctctgattttttcgtatccatacatatccatatagtatatacggattttaaatcatcataatttgaatttacaaactccgttccattctgctctgatatcattctgcccatgtaataggcaatcctgttttccagccggtagcccagctttgattttttgctgctcttctgggcttcaatattgatgataaattctcttctttttccattataatacaagggaaatttgatgtcgtaaataatttttccatcatcctcatcaactgactcattatttacgttctggattttaactccaagcctttccggaaatcttagcattactgtcggctcaccaatgcacggaattattttctcggcttccatttccttaaattccggcacgagcgcctgaactatataggctgctatctgcggatctgccagaatacacttcacgtagtcgtcactggttgccttgtcctgctctatagagctaagagttctggacaaatttgtcttcacttttctgtatatcatacacttctcctgtttccacatgaaatctgcatacatatcattttttatagccccattttttgtgcatacataatttcaaatgataataaccctttatattcctcaaataaatgcccgccacgcatagaaacgaatagactggtactttagctgatatttatttttaacacacaatcggatttgttgctgacacagcatgataaatcaacgggtaaagaacatccccgaaccatgtattcgaattgtagcctattgtataacagttgtcaatgtattttttcgccacagcgtaaggggcttcatcacatgagaccggcgggggcacgctctctcgcatgagcgcatagcgaagctgcctagatactgttgaattatgcacacgatacacagaaatgagctcccacggatgggagctcaaggagaaccgcgccacggacggcgcgtttcgacgttttcgttaagcatagtaaacctataaggcataattcctacagtatcttggcagtgtagcgtagctcacgcgagagaatgtgcaccagccagggctcatgggatgaagccccgtcctactgccaatgtctctgcaccaaaaaagcagcctttgagcttcacactcaaagtctgcttcttttttattttataaactgtccatagcctgatacatggtaagcataggagccataacggctgccacaagtacaccaacaataagtgccagaacaaggataatcattggctcaatagctgccataactgtctgggtagccaactcaacttcctcatcatagtagtctgccagtcgggtaagcatgccttccaagtcaccggtctcctcaccaattcgcgtcatgtgtgaaaccataggtggaaacaatccacacgcagtgattggctcagacagtggaacacccttacttacttcttcccttgcatttttcagggcttttttgtaaagcgcattcttcatggtgtcagcagtgatgccaagggcttcaatcatcggaagtccggaatacacaagtgtggaaagtgtacgcgcatagttactggccgctgtcttgatgtttagctttccgaaaaccggaagctttcttgcgagattaccaaagaacatctggccgctgtcagtctgcttataaagcttgatggctataacaattgctgctatgacagcaatcacaatataccagtatccggtgacaaaatcactcatcgcaacaactgcctttgtgatgcccggcagctctgttcccaggtcattgaacatctccgagtagcttgggatgacctttacaagcattacaataacaaccgcaatagccacaatcacaacgataatcggataaactgccgctttttttatcatgccgttaagctttgctgatttctcgaagtgtgcagacattctgtcaaaagctacatcaatcttgccggatgcttctcctgccgcaaccatgctcaccatgatgtcagggaaaacattcgggtattttttcagaccatccgagagagtctcacctttttgaatctcggcatgaacacctctgatagctttcgccataaccttattctcagtctgatcggatagcatatccagcgtatcaagaatcgtaacaccggcattgaccatactggtgaactggcgacagaataccgataggtctctcggctttacctttcctcctacactgaatgagatttccttggtcagtgctgttgccttggtgaggcttatgaccatgttgccatccatcttaagcttattttttgcctctgcttctgactcggctactatatttccttttctttcttttccgctctggtctataatctgatatgtccagtcagccactttcttctcctccttatccctattctgtgcaacctccagataaattaaatcataatttattaaggcttcacaacattataccataacagtaaaacacatacgattataccatcaatagtaaaggtgtacacggctagccatgcttaccggatcatgtgcatatgcaactgcagtctccggcgctataaggccctggctgtaatactgtaaaatacagtcatccatcatcatcataccctctctctttgaggtctgtatgatagatggaatctgaaatgcttttgcctcacgaattaagtttctgatggcattgtttgcaagtagcacctcaaatgctgcaattcgtccgccatttaccattggaagcagatgctgtgcaacaattccctctaaaactcctgagagctgcacccgtatctgttgctgctggtgtggtggaaaaacgtcaatcatacggtcaattgcgtcggatgaactgttggtatgcagtgtagaaaatacaagatgtcctgtctccgccgctgtaatagctgtagatatagtttcaagatctcgcatctctcctacaagtattacatccggatcctgtcgcagtgcagctcttagggctgcagcatatgagagtgtatcctttccaacctctcgctgtgccactatagagcggcgccttgagtgcaggtactcgataggatcttcaagcgtgattatatttttggaatctcttgatgcaatgacatctataagacttgccaatgtggtcgacttaccacttcctgtagctcctgtcacgaggacaagtcctctcatctttgtggtgagattgacaaccgactgtggtatgccaagctgctgcggtgtaggcacatcatatgagagaatacgaagtgctgctgcatatgaacctctctgtctgaacacattggctctgactcgtgaaaagccctccaccgaaaaagcaaaatcaagctctccatttttctttagcacatctttaagctcctgcgggacaattggagaaagcaggttgtccgtctcaacattggaaagaacctgatttccctgcggtacaagcattccgtcaattctaagcataaccggatttcccggtgcgatatgtatatccgatgagttctgttgctgcgctgcttttaaaatgtctactatctgcattttcttttcccccttagttttcaaacgtggtctttaacatttcctggaatgaagtaactccttcgagtacaagcttctctgcactctgtctaagtgtatgcatgccctcatcacatgcagccttgtttatatcctctatatcaacaccttttgaaataagtgactttagctttggtgttatggtcattatctcatatataccgattcgtcccttgtagcctgtattggcacatttttcacagccacatggctcataaatctttaccggacggaacgccggtatattcataaaggccttttcctcctctgtcagcagatgctctctcttacatgccggacaaagtcttcttacaagtcgctgtgcaatgattccctttaccgaatccgcaagcagataactttcaactcccatgtcctccagtcgtgaaatagtacttgccgagctgttggtatgcagtgtgctgaccacaagatgtcctgtgattgacgcctgtactgcaatctgtgctgtctcctgatctcgaatctcaccaatcataatgatgtccggatcctgtcgcagaatggaacgaagtgctgatgcaaatgtcaggtcagctttattatttacctgtacctggtttattccatctatattggcctcgaccggatcctcaactgtgatgatatttacatcctccttgttgagctctgaaagtgccgtgtaaagcgtggttgacttaccacttcctgtaggtcctgtaacaaggatgataccgtttgtattcatcagtatatgatcaaatgccttaagctcttcgtctgaaaatcccagctcctttttatctcttgtaagtgcctttttctgcgcaagtcgcataacgcatttctcaccgaatactgtcggaaggattgatactcggatatcatactctatcttgtctatctccatagtgatacggccgtcctgaggcttacgtttctcggaaatatccataccacctataattttaagtcgtgtaataattgcagaaagcagatgtatactatatgctgccttctcataaagcgcaccatctattctgtatcgcaccctgactttattttccagtgcctctatatgtatatctgaggccctgagtctggctgcctgctcaatgatagagttgacaagtaaaactaccggcgaattgttgacatccttgctggtagcttcctcagcctcggcatttttctgctcacgctcttttctctccctcgcatactcctgagccgctttcatagcctctgtatcaccgtaatatttgtcaagcgtcaaaagtatgtctctgcctgtcgctactgcaggctcagcctgtagattggtaacaattgaaaaatcatcaagcgcaaccatatccataggatcagccatggccacatgcactacattggcattattcttgtcaaatgcatatggtatcataacatgctttctaagcactgtctcactgacaaggttttgcacctcctcaggtatgttgattgcgctcacattaacaagctccagtcccagctgctgcgacaatgcctttgctatctcaagctcattggtgaacccaagctcaatgagtgtttctcctatcttcttatgcttttctttggctataggcagagccttttccagctgctcctgagtaattacattttcatttataagcatatcaccgatacgctttttctctcgtctaaaagccatagtggctccccctctttcatcatttagtaaaatactaccattatgatggctgtatttcaagggtatttatataaaatatacaataaatttatttcaaaactaaaaagtaacgattccgagtgcctgcagcaacagtataagcaggaatgccggtgcaataaatttaaccatgattatataaagcccttttctggtgaatttgctgcctccgcgtgtcacctcatctattattacctttggacttactatccagccaacgaggatacatgtggcaagtgcaacgattggcataagcacattgttgctgacatagtccattatatcaagtatctgtccgactgtgccgtttggaagcttaacctccatatagagcttattgtagccaaggcagactattatctctgcaatcagaccatataccgtgactaaaattgcgctttttctgcggctccaatgaaatctgtctataagactcgatacaatagcctccataattgatacagacgatgtgactgctgcgaatgcaactatcatgaagaatatcagtccaacaatatctcctgctattcccatttcattaaatacctttggcagcgatataaacataagccccggtcctgctgacatgccgtctctgcccataaatacatatactgccggaataatcataagacctgcaaggaatgcaacaagtgtatcaaaaatctcgatctggttgattgagcccatgagctttgattccttcttgacatacgaaccatatgcaaccatgattcccatagccacactgattgagtaaaacagctgaccgagcgcatcaacaaatactgtggcaagcttttgcattgtaagtcccttgaagtcaggaaccacatatatcttaagaccctcaagaccacttcttactgcgcctgatgcctccttataatggagcgtcagcgagaaaataccgattgcaaaaataagcacaacaaggataggcatgagcaccttgctgaagcgctcgatacctttattgactccgccaatgacaactgctgctgttataagcagatacaccactccaaatatgattggtgcccactggcctgtgataaagcctgtgaaatatccatccgcaaccgcatttttaccgcttcctgtaatgaaaagggtaaaatactttaaaacccatccacctatagtacagtagtaaggcagaataatagccggtactatacacgcaagcacaccgataaacttaccctttggattgataaaaccatacgcggtgagcggtccctgtccggtcttacgtcctattgcaatctcagtggtaagcaatgcaaagccaaaggtcagaacaagtatcagatacaccaacagaaaaagtcctcctccgtcctttgctgccagatacggaaacctccatatatttccaagtcctaccgcactgccggctgccgcaaggacgaacccaatgttgccggaaaaagtgcttcttgatttttctttcattttctactgtctccttaatatattatataatttaatttcgatttaatatggacattgtttccatttacaaatctaatatacctattataatcatctggagtacattttgcaacggttgatattttttattcgcatttgcagtacgtgtggtggcacatggcaggtgtcgtgagtgctacgctacactgtcaagatactgtacgaattatgcctcaaaaactttcttaacttgacgaaaccgtcgctactcgccctccatggctcgatagctccttgtcccggcgtccatgccgggacatttctgattttcatctggcataattcaacagtatctagacagctccgctattcgctctcacgacacctgccatgtgccaccacacgtaacgcaaattcaccacaacataaggaacgtaagccccaggtaccgcgggcgcacacgtactcccgccggagcgcatagcgaagtggcttagatactgtagaaattatgcccacaaaacgcagaaatacccagccatggacggctgggtaaggcgttatgcgccacggacggcgcataaaagccggtttcgtcaagcatagaaacccatcaagcataatttcgtacagtatcttagccacgcagcgtagcgacggcaggagtacgtgtgcgcccgtggtacccggggcttgcgttccgtactatttattatcctaaataaggttcttgattccctctgttaaacgctttgcaactctcacattgttcatagtataaaggtgaattccctccacatcattagctaaaagctcaattatctgactctcgcagtaagacattccggcatcaaaaagtgccgccttgttgtctccgtatctgtgcacaatcttctggaacttctccgggaactttgctccgcacattgtgaccattctctgaatctgagccgcatttatacaaggcatgatgcccgggataacaggcacattgatacctgcaagcctgcagtcctccgcaaaattgaagaaggtattattgtcaaagaagagctgcgataaaagaagctctgcaccggcatcaacctttttcttaagattcttaatatcatctaccttatcagctgcctccggatggatgtccggatagcacgcacctgcgatacagaactgatcacctgtggtgtcctttatatacttaataaggtcgcttgcatggagaaaatcctcctttgcaggcacgttcggatttctatctcctcttaaagcgaggatattctcaatgccctcatatgaaagctgtctcgtgaactcatctatctcagccttgttatagcacagacatgtaaggtgtacgaccggctccacattgtactggttcttgattttcttcgcaatctcgatagtcttgttattgtttgagctgccgcctgcgccaaatgtcacgctgatgtactcaggatgacaatcacagagtatctcaagcatctcgtctatatttttgaagtcctcctctttctttggtggaaatatctcaaaggagagcgactgtggtttgtttgtatgtatctgtgtaatcttcatgttatcctccggtatatatggttattcaataatttgtaatttttatattccatatattactgtagttttttgtcattgtaaaatatatttttcttttagtttgtcataaataaaatctatatcaaaacttgctgagcatttgatttttttatatgaggtgatataatgggcgaagcaaatcaaaaagaggtttcaaaatgaaaaaaatagattttgataatgattcgataaagaaaaatatattgcaggctgctctgcccatgctggcagcccagattctaagcctgttgtacaatatagtagaccgcatatacattgcccgcataccggatatgggaaccactgcactcggtgctgtggggctttgctttcctattataatgctgacaatcgctttctccaatctctttggaagcggtggtgctccgcttttttcaataaaaagaggcatgagtgatgacagagccgccaatactataatgaatacgagctttacaatggtctgcacattcgcagtcgtttttacagctttgtgcatgatttttgcaaagcctcttttaatcgtgtttggcgcatctgaaaatgctctcaaatacgctctgccatacctgctcatttatttgataggaacactcccatccatgatttcaaccggcatgaatccctttatcaacgctcagggctactccactaccggcatgctgtctgttgcaatcggagccgttgccaatctggttttagacccgctttttatatttggatttaatttcggtatcaaaggagcagctattgctacggtcatctcacaaatactgtctgctctctatgtgcttcactttcttaggaaaaaggctgagcttaaggtgcgccttatgacactctctgaattcagtgaaaacacgcgctatgcaaaggacatcataagccttggaacctcaggctgtgtcatgcagctcacaaacagcctggtatctatatgctgcaacaatgtgctttcagtgaccggtggcgatttgtacatatcggtaatgaccatcgtatcaagcatcaggcagatggtcgagactccaatttatgcaattgtggagggttcatctcctgttttaagctacaactatggcgccaaaaggccggcccgggtgagaaaatctattttcactatgggactgctcgtgcttctatatacagctgttatgtggagtgtgattatacttgcccctcatgccctgattgcaattttcagttccgattccacccttatggatgatgcggtgaaggctttgaatatctactttgcggcattcatatttatggatctgcagtacatcggacagaccacctttaaatcactgaacaaaaagaagcgggctatatttttctccctgcttcgcaaggtgttcatcgttgtaccgctgacatatattctgccttactcctttggtatgggaaccgacggtgtgtttatggcagagcctgtatcaaacgtgattggcggaagcatctgctttgtaaccatgcttggcactgtgctacctgagcttcgcagaatggagcagtaattacagcatctcatcaatgcagatgccgtagcctccggtcggatcatcgacaaacacatgggtgactgctcctattattttaccatcctgtatgatagggcttccggatgtgccctgcactatgccaccggagagctctatcagcctgtcgtctgtcaccttaagctccattcccttgtttgtatctgtcgcttttttatctatatttgttatttccagattatatttttccagttttcccgatatttccgatatcatctgtgcactgcctgtgtgtatctcatccttgccggcgaccggataatacgtatcctctgcggcatattccgacaattcatcgctgtctagctgtccgtaaattcccagattactattgcagtcaagtgtgcctatatggctttttttgccaaaatataccactccgcctatctctcccggcgcgccggcttttccctttttgattttggtaagcttcatgctgtacaaatcaccactgtttgcatacaagagattgccgctttgcgttccgtctcctattccatgccccagcgctccaaaacggccgtcctttgtataataagtgatagtaccgattcctgccagatcatccttcacccatattcccatatagtatttgccatcatccatcctcacaggcgtgatatccgctgacattttctcaccgcctcgaagaaatttaatgtttacggtacttttatcttcatgactttcatcatgctgcttcataatatcattcacagcttcagaaagttcctccttgtctgccacagtgcgtccattgacagataggatataatcaccgcactgcacctttttatctgccggattgactttttttccatcctcgtctgtcacctccgtcgtattcactacaagcactccctctgtctgctcatatataccggtcagcctgccacaggcatatacgccctcaacacttattccagcacttattttatctgtctcttcataatctctgtgagttgatgctgtatctgctgtctgtcctatgccttgttcggttccaccgtttccactgttttcaccggttccgccgttttcaccattttcaccattctcgcccgaatcagccaatacactggccgcctgtcccggaagccctgtcgcatatcttccatatccggcctttgattcatttaaaaaacttcctaatgcactttcatcaaatgccttatctaccctgctgcaccacttatcatcactgcttagtgcaaacatagctatcactgctgcagccagcgtgacactcacaaattttccaaaaaacttccgcatactattacctccatttggattagtatgctcctgtaatttttcttttattcgtaaccgaatatagtttgacagtttatgtgttttcctatataatttcgatatatttatatgattaaaggggcaaaataccttttgaccctcatatcatttatatgtttattataaatttcacatataattcccacgttgtccgttacaaataaatactgtaatagctttataattcttaaatcaccatttaataaaggagggattccatgaatacatacctgctcatcacatccatagtaatcttcttatgtatcctgctaaatcgtgtctccaatcgcataggcattccggcacttttagcctttatcgtgctcggcatgctttttggctctgacggaataatgaagatagatttcgacaattacgcgttcgctgaacagatatgctctaccgcgctgatatttatcatgttctatggcggctttggcaccaactggcagcgtgcaaaggctgttgccgttaagtctgtgcttttgtccaccatcggtgttattatcacatgctttctcacagggctgttctgtcactttgcccttaatatgagctgggaaataagctttctcctcggtgcgctgatttcatcaactgatgcagcgagcgttttctccatactgcgttcgaaaaagctgaatctgaaatacaataccgcctctcttcttgaagtggaaagcggtagtaatgacccatgtgcctatatgctcacagttgcttttatatccatatctcagggcagcgcaagcccgggaaatattgccatactcatagtaaagcagcttgccttcggcataatcttcggcgtcctgattgcaaagctttccatcatgctccttcgatatatacgcttcaaaagcgcggggtttgatgcgattttcatggtgggaattgctctgatatcgtatgccctgcctgcttactttgacggaaacggcttcttaagtgcctatatagtcggcattatactcggtaacacagaaatagaaaataaaaagaatctggtaaatttctttgatggcataacaggactcatgcagatgcttattttctttctgcttggtctgctttctttcccatcaaagctgccacacgtcatagtaccggcacttttaatatttatgtggctgacctttgtggcaagacctctttctgtcgcacttgtgctcacaccatttcgcagcaaaataaaacagctgctgcttgtctcatggtccggcttaagaggagctgcatccatagtgttttccatcatggcatataccgccaccaatgatgacctcgacaccttccacataatatttatgatagtacttttttcaatactgcttcaaggctcaatgcttccatggatatcacgaaagcttgacatgcttgataaaacagccgatgtaatgaagaccttcaatgattactccgaggaagcagatatccagttcatacagcttaccataccggaaaatcatctgtggtgtggccacaagctaaaggacctgacgctgcctcctgagacactgattgtgcttatacgaagaggtgagcagaatataataccggacggtgaaacaataattctgcaaaatgatgtgctcgtgcttagtgccatcacacctgatgaggtgcatggtataaaactggtggaaaaaataatagaaaaagacagcagatataacaataaactgctgtctgaaatatcaaaaaaacacaatgagattataataatgatccaaagaaatgggcaggtaatcatcccaaacggaaacgtacggctgaccaccggtgatatactggtaatcaaccgcgccgtaaactgataatgtcagatttttttctccatggcaagtgctttcatctcgcgtgcgctctccatcacggtatctgtgatttttgcaccgccgagcattctggcaagttcagccacgctgtcattgtcagttagtcttcgaatccttgaaaccgtggatttgttctcgactgctttttcaataaggaaatgtgcatctgccatagctgctatctgtggcagatgtgtgatacatataatctgatggttgcggccaagctcattcatcttctcagagaccatctgagctgtacgtccactgattccagaatcaatctcatcgaaaataagcgactcaatgtggtcattttctgccatgattgtcttgatgccaagcatgatacgcgacagctctcctcccgatgctaccttgccgagcggcttaagcggctctccggggttagttgatatgagaaactccggcgcatcgatgccgtttgccgtatagtccggcaatctgtcaaactgcatatcaaactgtacatcaaggaaattcaaatcattaagtgctgatttaatttctgacacaagctttacagcactcctttgtctgatttctgatacctcatccgatatctgtgccagctccttttcctttttcgcaagctgctgctctaatttctgtaaataagaatcataatcattcaggacactgatacgctccctcttttcattgagtgctatcagtatatcatcaattgagttgccgtatttgctctttagatgatttatctcatccagacgcttttgtgtctcatagaaggtctcctcgtcaaactcagcctgtgatatatatcctgatatctcgtgattaaaatcagaaagcagactgtctatctctgacagctgactctccagagcttccacatccgtatcatagcctgataccagtgacagctctcttaccgccctgccaataagctctgaggcactctccatctcgcctcctgtggcagaatatgcagcatttacgccctccatgattttctttccatttgaaaacttcctaaactgcgcctcaagctcctcatcctcaccagacaccagggaagcttcttctatttccttcacctcgtactcaaggaatgacagctcacggcttctttcttcattgtcgatatttgacttttcatactcatccttaagcgccctatatgctttgtatgtgactgaaagctgctgctttttatctccaagcggctgctttgcgtactcatcaagtatatcaaggtgttttttctttgataaaagtgactggtgctcatgctgaccgtggatatctatgagatatgaggctatttccttcattcgcgaaacagacacggcttcaccgtttaccctgccgactgcgcgcgactgtgtgattttacggcttaaaatcacgcatccgtcctcgacctccacatcaagctcccttaaagcctctataatctttgggtcctcaactgaaaaaataagctccacaaaagcgggcttttcattgtctcttagcatctccttttgcactttttcaccaagcgccagattgatagagcctatgatgattgattttccggctccggtctctcccgacagtatatttagtccgtcggaaaactcaacctcacactcatctatgagtgccagattctttacatgtagattttgtaacatattttctccttcctctcccaggcatgacgatatatgttattttctgttacagttcagctataatctgatattcatgtaacattattccacaattctgcggatttttttcatcaccgcatatgtatcatcaacagtccggattgcacacatgattgtgtcatctcctgcaatcgaaccgacgatttctctcatcttcatggcatctattgcagcacagacagcgcttgccattcccgatacagtctttataacgaggatattctgtgccatatccattgacaaaaagccctctctgagtactctttcgtatttctttgagagattctcaggtgcatccgttatcacggcgtacttctgtctgccgcctgcggtaggaatctttgtgagcttaagctccctgatatccctggatactgtggcctgagtcacgcgaaaaccatctttttcaagaagcgcagacagctcatcctgcgtctctacctcattcttttggattatctcaattatcttggattgtctgtttgttttcatgtcctgccacctcataaatattatttgtaactattcattataacaatccttatctgtgttatgaataatttcccatctttttgcggagtatctccaaaaagcttctctggtgaagcttgcaaatctttgtatgattggctgcctttgaaataacaaaacggtctcccacagccagctctgccgtagtgtcgccatcatagctgacacacgccatctcatcgttttgctccctgcggcttagaatctctatctctatctcatcatcgcctgaaagcacaatgctctttgacgtaagattgtgagcattgttcggtgtaagcagtatcatatcgcccttcggatccacaatcggacctcccgccgacatactgtagcctgtagagcccgttggagtcgcaacaatgatgccatcggcatggtaattgtttaaaaactcaccgtttacatacacattgaggcttaatatctgcaaattgccctttctatggatgactatatcatttaatgcaactctcgaggtctcactgcctcttttatgccctgtgagcataatacggtcctctgtcatgtatttatcagccatgagcgaatcaatagcgtcaaataccgtagcttcctccacctcacacagatagccgagtgtgccgagattcactcccataagcggaatctcaagtgtctccacccttgtggctgcacgaatcagtgtaccatctccgccgagcacaagaatacactgcgtatcctgtggtatatcctcaagctcaaactcgttatcggatatagcctcgacattgctcataagaccctttgccgtgccgcccttttgctctatgtatgccactattttatttgtaagtgcaaaatccctgtccttataggcatttgctatcacaacaaaatgtttcatagtctatttcctgtccagctctccatgcgcggcctcgaccacactatgaatatccactgattcctcctttataggatcatctgtctttttgatatgtacgaggtactctatattgccctccggtcccttgattggcgaatactcaaggtctaacacactaaatccatttgaaagtgcaaaggatatgatattgttcactacctcctcatgcacgctcttgtcacggaccacgccctttttgcctaccttttccctgcctgcctcaaactgtggcttgataagacaaaccatctcgccaccgtcctttaacagtgctcttgcaggacctaacaccttggtaagtgatatgaatgacacatcaaccgatgcaaaatccagctcatcatctatgtcattgggcgtcacatacctgatattggtcttttccatgcacaccacgcgctcatcctgacgcagcttccatgcaaactgaccatatccgacatccacggcatacacctttttagcaccattttgaagcatacagtctgtaaaaccgcctgttgaagcacctatatccatgcacaccttgccatccattgtgatatcaaagtgcttcatagccttttcaagctttagccctccacggctcacatactgcagtgtctttccatgaatctcaatattgcagtcatcaggaaatgtgcttcccgccttatcctcacggttgttatttacaaaaacattgccctccataatcatggtctttgctttttcccgtgatggtgcaaggcctctgtttacaagtaatacatctaatctttctttcatactgtatgttacctctatctataatgctgctattatacgcttagccacggattcggcatccacatgcagctcctttttgagcacctcgacattgccatgctccacatagcagtcaggaagtgcaactgtcaacacctcaagagctatgccgttagtcttgacatactccgtcacatgctcaccaaaaccgccgctttgcacgttttcctccatagtcacaagcaagctgtgttcagccggcagttccttaattgcttccttatcaaaaggcattgcaaaacgcgcattgataagtgtagcagagattccctctgcctcaagcagctttactacatcaacggcagtctttaccatactgccgagtgccatgatagccaccgtgcttccctttctgatcagctcactctttgcaagctctatcggctgtctgatttccttaaggccgtcataggctgcccctcttggatatctgagtgcaatcggaccgtcatatgccactgcaaacttcatcatatcagacagctcccacttattcttcggagccatgattgtcatattcgggatgaccgacagatatgatatgtcaaatattccctgatgtgtctctccgtcactgcctacaagccctgccctgtcgattgcaaagatgacatgcagattctgtatgcacacatcgtgaagtatctggtcaaacgccctttgtaaaaatgacgagtacaccgcaaataccgggataagtcctgcttttgcaagccctgccgcaaaggtcgtggcatgtgcctcggctattcccacatcaaaaaatctatccgggaaattgcggtggaatctgcgaagccctgttccatctgccatggcagccgttatcgcaactacctttggatttctctcgcccagcttcttcatgactgttgagaagacatctgtgtaattggccttcgtgcgcttattctttggaagtcctgtctctatgacaaatggctctgcaccgtgaaatctggaaggataacgctcagccgggtcatagcctgatccctttttcgtaagcacatgcacaagcaccggaccatccacacgctttgcctcatcaaacacacggcacatttcctttatatcactgccatccacaggtcccaaatagataatgcccatctcctcaaagaacatacccggaataaaaagctgctttatgctgctctttgtattcctgatatgctttaccatacgctctccgtagatcggtatatggtttagggaattcatgacattattcttaaaatccctgtatgcatccgctgtgcgaaagcctgaaagatactggctgatgcccccgacgttctctgaaatcgacatattgttgtcgtttagcactataataaaattgcctttaacgcttgaagcgttgttgagcgcctcatatgccatgcctccggtcagcgcgccgtctccgatgactgaaaccacatggtagtcatctccggtcacctgtctggctgtcgcaagcccaagccctgctgatatggatgtggagctatgtcctgtattaaagcagtcacagtcgctctcatccgcctttgggaaaccgctcatgcctccatactgtctgagcgatgaaaatccatcctttctgccggtgagtatcttgtgtgtgtacgactgatgccctacatcccacactatcttatccttcggtagattaaagcacagatgcagcgccatggtaagctccacgactccgaggtttgatgccagatgacctcctgtcaccgatatgctctctataagaaactgcctgatttcatcctttaacagctcaagctcctcaggtgtcagtttttttatatcattttccttttgtatcttttctaaaaccatcctatttctcccgatggatcaaatattcaaatagctccttaagaaatgcatcgtcgtatcccaaatcatcaagctgctcctctgcctccttggagatgcgctccacatcagaaactgctttatctaatccctcaaatgtgacatatgtcgctttattatttttctcgtcactgcctaccggctttccaagcacctcaagtgtacttgtgacatcaagcacatcatcctgtatctgaaacgcaagccccagctttgccgctatctgctcaacgcgtgatacctcatcagacgacgcccctgcaaggattgctcctatcatcatcgagctctctataagtgcgcctgtcttaagcctgtagataaagtcaagcttttcccttgtgataggacagtcatcggatttctcgctttctacatcaaccacctgtcctccgaccataccatacacgcctgccttttttgcaagcaccgcaaatgcccttgccacacgcgtatcagccacttccatgtcaaaagcctttgctgcggtctcatatgccaggtttaaaagtgcatcacctgcaagaatgcccatagcctcaccgtacacagcatgtgtggtcttctttccacgcctgtactcatcattgtccatggcaggcaggtcatcatgcaccagcgagtaggtgtgtatcatctcgattgccgccataaatggctcaatcactgcactgcttccgccaaacatatggtaagtctcttccatgaggatagggcgaagcctctttccaccggctctcacactatagttcatggcctcaaaaataatcctctgctgtccctcctcaacgggaagaaacttctcaagcacgttatttatatgctctaccttttgctgcagctcttccatgaattgtgacttatttaaattcccatttaagctcatcagaattcctccagttgtccgtcgctgtttagcacaagcatggccttttccatgccctgtaccatatcattggcactctttacctcatcaagccccttcttgtagagctcaaaggcctcatccagggatacatccgcatcctccatcctcgccactatctgctctaagtgtgcaaagcgctcctcgagtgtcagtgttttttcattttctttgctcatcgttaataacctccgaaactacggcccttgcatgaccgtctatcagatatatttttatgtcatcgcctgcattgatatcggatacactgtgcagtgcccccttcttttccacctcgacatacgcatagccctgtgccagttttttggccggtgaatatgcatccagtgtacctgaaagcagcgccagacgctgtctgcaatccgaaagtctctgcttcataatcctttcaagtgcatcctcgatatctgccagacgccttttattctcatttagtttattctgtggactaaggaaattaagtcttgttttaatatgtgacagcttttccctgaaaaaatcaatccgtcctgtcagatttctgtccatcctgcggcacagattgtcaaggcgctctaacgtctgtctgtagtcactgactgcaagctctgcagccgctgaaggtgtgggtgctctcctgtctgacacaaaatccgctatcgtccagtcggtctcatgacctactgccgagatgattggcgtgcggcagtcaaatatggctctcgccacaatctcctcattaaaggcccataaatcctctatggagcctccgcctctgccaactattatcacatcaagattcatcgcatccaatgtctgtatgcccttcactatgctattagccgcaccctctccctgcacaagtgccggataaagtatgacctgtacatatggatttctgcgcgatgatacattccttatatcctgcacggccgcgcctgtcggtgctgtaaccacaccaatacgtccggcatactgcggaatgggctgcttgtactctgccgcaaacatgcccatctcctcaagctcatgctttagctgctcgaatttgagatacagattgccctctccgtcaagctctatctttttggcataaagctgatatgcgccggtcttctcatacacctcaacggaacctgtcacaataacctggtccccctccttcatgtggaaagaaagtcctgccgccctgctgcccgcaaacatgatagcgttcatggctgctcccgcgtcctttattgtgaaataaatatgaccgctcgtgtgatacttgcagttgctcacctctccctttatgctcacctgtctgagcataaaatcctgagcgaacatatttttaatatagctatttacttgcgctaccgaatatatatttctatttgccatgtttaatgctctatatcgctgttcctcttaagctatgcaaactttgcaagcactccgtttacaaatgcacctgactcatctgcaccatacttctttgcaagctcaacagcctcatttattgaaacctttgtaggaatatcgtcctcaaactttatctcataaactgccaatctgataattgccagatcaacctttgccatacgattggtcttccagcctgtagacttctcatcgatgagtgcatcaagctctgccatatgctcaataatcgcactgcatttttcatcaatatactgtctttcctcgtctgtaggatttgtaagctcatcatttaaaagctccatctgctctgcaagctcagacttgtcatgaaactcaaccctgaaaagcatcttaaaaacgttttctcttatcttgcttcttgtcatttaaattcctctcgtgaatagtattttatataaattaaggatgtctgtacgacatccttaattatactacatttgtgatcatttaaaaagaactatttaattctctcccatatcaacacttgctatacgaacattgatagtagccacagaaagccctgtcattgtctcaattgcagacttaaccttctcctgtacctttgtagaaacctcagggatgctgtatccataagcaatattgagtgctacatcaaccactacctcattgtctgctatctcaatctgaattccctttgagagattcttcataccgagcctgctgacaatctcgtttgtgatattgcctgccatggagcttactccctcaacctcagtagcagcaagacctgctatgatagctacaacctcatctgctaccttgatctcgccagactcatctgatttgatatttattgtgtttctattctctgccatgtccatgttcctccttaaccggctatacggtctgtccctttgccacgtaaacctggaatgagtcatttcccgtaagtgatctatttcttgatacgcgaacattcttgtctgtgatcacgtactccagattggcgccatcctcaatcaccgtatcctgtagcaggatgcagttcttgacctttgcattctttcctatcttgacgcctcttgataggatgctgttttccacggtaccctcgatgacacagccatcagcaaccatgacattcttggcttttgagccatttatgtatcttgtaggattatcatccctgatctttgtatagatagaattgccactcttaaacaatgctttcctgttatcctcatcaaggagcttcatattctcctcgaaatagctcttcatatctgtaatctgtgaagcatagcctgtgtactcatatgcctggatattgagtgaatcagtgtttgtagccatcagatcccttgtaaaataagaataaccatgtacaaaagcgtcatccactattctaatgagcttctccttctccatgatatagatattcatgccaaagtttaccttgcccatatccctgtcattgatatatatctttttgatacgtccatcatctatatcaaatgtatagtacatctcatcattgttgccgtttggtcttaagaataccttcggtacctcctgcttgcggtacattgcagtgatatcagcccctgtgttcttatgtgcctcaatcagctccctgaaatcaaaattgaatacatagttggcatcagccatgataacatacttctgagtgcactttctcagatagcccttaaggctttcgattgcctcaacacggccctcatacaccttaatctgcttctgtgcataaggcggaactatattgataccaccattttttcttgcaagatcaaactcctgacctgagcccaggtgatccatcagagagtgatagttcttcttaactatgagagatatattgtcgattccgctatgtaccatgcttgaaatcaggaaatcgcagagtctgtaacgacctgcaaacggaatggaagccataagtctctcggataccatctcaggaatgagggcatcgtagctgtttgcaaaaataacggccaaagcctcttcgttgttcatgtttagcattgttcctggccctcctcaacatcattatataccattgcctttggtcctataaccgctctgtcgccaattgtaactcccggtgcaattgtagcaacatcacctgtcacgtcctccgccggcttttctccaataactgcatcacagcctactgtaacgccctctgcaactatacagtgtgtgaccttagcgcctctttttatcacagtatcacccatgacaactgcatcctctaccacagcgccctcttctacgatgacaccgccaaaaagaattgaatgctttactgtgcccttcactacacagccatcggtaatcatagagtctgtaacctctgcgttgttgccaatgaaatgtcctgtatggccactgttacggctgtatatcttccagttctcatcaaacaggttgataccgctgtgctcaggatcaagcacctccatgtttgcctcccagagtgcaggtattgttcctacatccttccagtagccgttaaagtgataagcatacatcctgcggtcatccctcaaaaggtttggaatgatattgttaccgaaatcattctctgaatccggatcattttcatcctcgataagatacttcttaagtatatcccaattgaagatataaatacccatggatgcaagattagacttaggattctttggtttctcctgaaactctgtgatcttgtcgtcatcatctgctaccatgagaccgaaacgtgatgcatcctcccatggaacctccataaccgctacagaaaactcagcatttttctccttatggaacttaaggaaatcactgtaatcctgcttacaaatctgatctcctgaaagtatgataacatactcaggatcatatctctcgataaatgcaatattctgataaatcgcattggctgttcccttgtaccagtctgagcctgaagccttctgatacggtggcagcacatgcactcctccatataatctatcaagatcccatggctgtccatttcctatgtactcattcagcacaaacggctggtactgtgtcaatataccaactgtatctatacctgaattaacacaattagaaagcggaaaatcaataattctgtatttgcctccaaacggaactgccggctttgcaagtttctgcgtcagtgcataaagtctggagccctgaccaccggcaagaagcatcgcaactagctcttttgccatattaaaatcccccttatttaattttattaaatttttgttagcttttgcaattattttggttttttataatggtttatagttatattttaccacactttggcatttatgcaattcaaaattaactaaaaaatactataatttttgtcattattttccaattatctcgcggttgtttatgaactcgtacggcacctcctggtacacataataattaagccagttggaataaagtatattgccgtgagacctccactgtaaaagcggcttttgtgtatcatcattatccggatagtagttcaccggcatatctatatcaagcccctttttcttatccctctcgtactcattgtgaagagtatatctgtcatactcaggatgtcccatcacaaaaatctttttaccgtcctgatccatcagaaggaatactccggcatcatccgactccgcaagtatggtaagctcaggatgctttaatatatcctcctttaagacctcggtatgccttgagtgtggtgcgtaaaacacgtcatcgaagcctctgacaagtgggatttttctgttctttacacggtgcgcatacacaccaaatttcttctttggaagcacacgctttggtatgccgtagtgataatataatcctgcctgtgcaccccagcacagatgaagtgtggagaaagcatgtgtcttgctccactccattatactgcatatctcatcccagtagtctacctcctcgtattccataagctcaaccggtgcccctgtgattatcatgccgtcaaagtatctgtcctttatatcatcaaaggtctcgtaaaatttgttcagatgactgagtgatgtgtgagtggcctcgtgagtagatgtggtcacaaacgttacattgacctgtataggggtatttgacagtgagcgcagtatctgaagctctgtgtcctcctttaatggcatgagatttacaatcgcaatctccagctgtctgatgttctgatgtgatgccctgttttcgtccatcacaaatatattttctctctcaagtatttcctttacaggtaaatcattttgtgtctttataggcattttataacctcttttctaacgcccaaacatctctataaatgtatcctccgagatgataggtattcctaattcttttgcttttttattttttgatgaagtagattcagtgtcgttgtttaccagatagtctgtcttttttgacacgcttcctgtcaccttgccgccctgtgactccacatatgccttaaactcgcttctgttggcaaaatcatgcacatcgcctgtgataacaaaggtcttgccgtttaagcttccctccgacatatcctttatatcgaccttttctatgtcaagctccttaatcagtgcttcaaacatcgcgctgttttttggatttgcataccattcaagtatggagcctgacttttcctggcctatgccgtctatatccacaaagtcagtggcatttctcatcctgtccgcgaagccatcaaaacctattgcgttgacaatcttcttgcctgcatcggtacctataagaggtatacagagtgcaaatatcagattaaccggatggacatgtctgcttttttcgatggcagtctgcatattcatgcacgacttctcgccaaatccttccatgctgcttatcttatcaaaatgctctggcagatggtatatgtcagggaactgttttataaatccctcatttataaattttagcattgtctgtaccgaaagtccatctatatccattccgcttttgctgacaaatcttgaaaactttttgacattcttggctgtacagtcagggtttgtgcaatgcagcgtcttcacaccgctgtttttacttacaaatatgcgtgtcggatgatgacacaccggacattccttcggtatctcaactgctcccaccgcatcctttacagctatgcattttggaataatcttgttggcttttatcacggaaagtgtacactcttttcccactccaagcctttctatttcagtcagattgcaaagcgaagctctcgaaaccgtcgtaccctctatctgcaccggctcaaaaacagccactggcgatattgtcgaaaccgcgcacgaccattcaatataacgaagccttgtatctacagcctcatcctgccacttgaaagcaaagccggctctcgtagcatgatgtcctgtgacgcttccgcctgcagcgtaggcagtgtcatcatagcatatgacaagtccgtccacaggcacatccatcctgccactctcgacatcccttgtccagcgttttacagcctcatcaaggcctgccgcatctgttgcctcccttttgacaacattgaatttcatatcactaagatagctcattctatccccccatgatatgatatcatcatctatatacacgagtgtaaacgcataaaacactacatgtctgcgcttcacctcttccacatcatcgagatttaatgtaccggatgcaaggttccttggattggcatatttctcatcatcgtcctcgattgtatcatttaacagtttaaaatccgtgtaggaaattgtcgcttcccctcttacaaccatatgtcccttgtatggtatctcctttggaaagccgcttatggcatcctgcaaaaaggtgatgttacttcctacagttccatttcctctcgtcagtattttcacaagcctgccaccgtcatatgtgagcacgagtgtcagtccgtcaagcttccatgaaagccagattggcatatcacctgcccatttcttaagctcctcaatactctttgtcttggcaagtgaaagtgccggatactcatgtggctcacgatttcctgcctctgcctcatagcctgcattatgtgtcggactgtccggacggatatatcctgttttttcctcaagctgtgtaagttcatcaaacagtgcatcccactcgtagtttggcattatttcatctgcgccgttgtagtaagcttttgacgcgcggttaagactttcaacaagctcgtctatcttatcttttattttgttattctccatgctgtaataatcccctgtctgctttactttgctcttctatccggatatttcttatccgtatgtttcttatcagaatgattcttattcgtatcaggcataaccggctgattcgaggaatccgcaatcagtcttttgagccccttgtattcaagtggtgtcactgccctgtactttcctcttggcaggtcaccaagctcaatattcatgattctcactctctcaagcttaaccacacggtagccaaagtattcacacatccgtcttatctgcctgttgtagccctgtgtcagaataatcttaaactgctttgaggacagctttttcacatggcactttctggttgtcacaccaagctctacaagcggtacgcctcctgcgagccctcttatgaagctgtcagatattgttttgtttactgtgacaatatactctttttcgtgtctgttgccggagcgcatcatcttatttactatctcgccattgttggtcagaagtaaaagtccttctgaatccttatccagcctgccaatgggataaatgcgctttgggtaattaagataatctatcacgttgtttttttcccttttttctgctgtgcagactatgccggccggcttattgagggcaatcagtatcatctcttcttcctttgatactacctgtccattatatgtgacagtctgtccctttagaactctgtcacctgtctttgctgtcacaccgtctattcctactttgccggcttctatctgcctgtctgcctcacgccttgagcacacgcccgcttcactgaggaatttatttattcttacaccattttcttccataccatatcctctttttagattgctttatccgatatacataaacaaagcaacagccttttctactctttacgacagccatttgccatgtagattaaaacacggagacctttaagcctccgtgttgcttcttatgattgtatgcacatctgttactttatattgcttttactgtcctactgtctggagattctctgtcttgatataagctctgccatttgttccggcgctgtaggatactatagtccagtcgccctctgtgccatatgctgtaagtgttacctgttcctttaagagaccaagctcctttgcatctgtgcttgcaccgtcacgcacctttacaacatcctttgtcactacctgatactcagccggtgcctgtggctgctcagctgtctgctgattggctgcatttgtatccgtggtctgttggtctgtggtctgtcctgcgttagcatccgtggtctgctggtctgtggtctgtccggcatttgcatctgtagtctgctggtctgcagtctggcccgcatttgcatccgtggtctgctggtctgcagtctgtgatgcatcatctgcctgctgtgtatctgcctctgtagtctgtgtgtctgcatcagacttctttaaattggcaatgcctgacgatgtgtaccactgctttatagcacctgtgagtgttgtctcaagcatagtctttaaattggcatcagaaccgaccgcctgctcatatgccttttgtacctcctcatgcaggtctgcaaactcagatgaagcagtatacttagaaataagctccataatatcgtcatcgagttcattctcgcagtatgttctgttgaaattactgtatacattgtttataaagagctttccgtccttacctgtctctatataaaagaagtcaagtgtaggtgcctgtgtatcaactcccgtaaactttatgctgtttttaacagacacaaagtatgttccctttttcaagccattcttggtgtaaggtgtgatgtcattgactgactcatagtactggctgacaacaccaatatagctcttctcgttgtcgctcataggtgtcgcaagcttgccaagggtatcaaggtcatcacccacgtatgccttgtaataatcagcaagtaatgtgctgatatcgtccttggcgtcatttgtgtaatccttttcaaactcaaaatccttcaccgaaatctctgtctgtgatccggcttcagtattggattgtctgtcattattgcctcctgcgacaactactataagtataagtatgagtcctacaagtacacctgccactccaacgtattttttattttctgcacaaaattgctttatattatccaatgtttccttgttaaaaaagtccttcatatggttcctccattaacccaacatatcaaaatcaaagtatgtgaccgacgcgaatcgaacgcgcactcgccggagtcggagtccggaattttatccattaaactacggtcacaaaaaaagttaccaactatttatatcacatcttttactttttttcaatgttacttttttcttattatattcttttagtgttttattataactttttatgcatactattataattgataaaaatttgacaatatatttcatttatcttattatttaactgtttgggcattatatattggaaattttttccgatatgccataaaaatataccattttaattaatacaattactatttatataaggagcagtattatgagtttcacatttttaaaccagcttccaactcctgcacagattaaggaggaatatcctctgtcaaaggagcttaccgagcttaaagcgaagcgcgatgcaatgatttcagatgttatctgcggaaaagatgatagatttctcgtcattatcggaccttgttcagccgacaacgaggattcagtctgtgactatgtcagccgtctgacaaagattcaggaggatgtaaaggaccgcgtaatcatcatccctcgtgtatatacaaacaagccaagaacaaccggcgagggctacaagggaattgcctcacagcctgaccctgagaaggctcctgacatggttgagggtcttatcgccatgagaaaaatgcacatccgtgccatcgcagagagtggactcacctgtgcagatgagatgctttaccctgagaactggggctatgttgaggatcttctctcatatgtggcaatcggtgctcgttctgttgaggatcaacagcatcgtctcaccgtcagcggcttcgatgtggccagcggcatgaaaaaccctacaagcggtgatttttccgtcatgctcaattctgtttacgcagcacagcacccacatcattttgtttacagaggctatgaggttgagacatcaggaaatcctctgactcacgttgttttaagaggtgctgtcagcaagcatggcaacactacaacaaactaccattacgaggacttaatccgtctgcacgaaatgtacgacaagatggacgttgtcaaccaggcggctatcatcgataccaaccattccaactccggaaagaagttcaaggagcagattcgtatcgccaaggaagttatgcacaacagacagctttcctctgatatcaaatcacttgtcaagggtcttatgattgagagctatatcgaggagggcagccagaagattggtgagcatgtctacggaaaatccatcaccgatccatgtctaggatgggaggattcaaagaagcttatctacgacattgcagaaatgaattcttaaaccacaaattatacatacatttttttacaaaacacaagccacaggagtatatatcctgtggcttgcattattttgtcggtttattatttaatcatattactataagcaagaactgcactgactgttttggaatcctggatttttccggcataaatcatgtcgcacagctcctttagagtgtatatttctacatcgattgactcggcatcatccagatgctgctcgccctttttcaggtttttagcaagatagacatctacttcttcgtcgcaaaaggcaactgttgtgcgaagtgaaagtaaaaacgagatatcatcagagctgtagcccgtctcctccttaagctccctttctgcacacagtctggtatcttctcccacaaagtctctgcagccggccggaatctctattgtctccctctcgagagcatttctatactgacgcaccatgattatcctgccgtcatcaagcaccggaagcactgccgcagcgccctttctgtgtgaaacaaaatcccattcctcagtcttaccgtttgcaaactgcattgtatccttgtatatatcgagtattgagcccttatatacaagctctcttttttgccgtttcatttcatcaatcatttttcctgtttaccttctaaataatataaattcagagttaccgttttgattagaaatccacctctgtgtcataatagcagcatttgagaagcttctccatctcctcctggcttggctggcgaggatttgagcctgtacaagcatcaaggatagcatttgcagcaatctcaggaagtctctcaaggaatacctcctccggtacaaagccctgctctgttggatagctgtctgctccgtaattcctgatacagtgtgggatattcagatcatcattcatgccacgtaagtatttgataagaagctcaaccttctcatcaagtgtctctccacccagtttcatgaaatctgctattacgccatagcgttccttcgctgtctcatcctttgcattaaaagcaataacctttggcagatacatggcattggctgctccgtggatgatatgtgcaccataatctgcaaaagctgcgcctgtcttgtgtgccatggaatgaactattccaagtagtgcgttggagaatgccattcctgccagacactgcgcattgtgcatcgcatctctctttgccatatcaccattgtatgaatcaatcaggtcatgctgtatcatctctattgcatggagtgcaagtggatctgtaaagtcactgttggctgttgatacatatgcctcgatagcatgtgtcatagcatccattcctgtgtgtgcaacaagcttctgtggcattgtctctgcaagctcagggtctacgattgcaacatcaggtgttatctcaaagtctgcgattggatatttgatacccttctcataatctgtgatgattgagaacgcagtaacctcagttgccgtacctgatgtggatgaaatagcacagaaatgtgccttctttctaagctttggaataccaaataccttgcacatatcctcgaatgtgatatccggatactcgtacttaatccacatagccttagctgcgtctataggtgagccaccaccaattgctacaatccagtccggttcaaactcagccatggcagccgcacctttcatgactgtctcaactgacggatccggctcaattccctcaaaaagctttacctccatacctgcttccttcaaataagcctcggctttgtctaaaaagccaaatctcttcattgagcctccgcccacacagataatagccttctttccctcaaagctctttaatgcctcaagcgcaccctttccgtgatataaatctcttggtaatgtaaatctctgcattgtaaaaccctccatatgatattttattatatagtttctcccttgtaatatttataaatattgcagccatcaaatactaaatagttgctaaatattacacttaccattttataacattttactaattttgtcacgtactattatctatttttgtgaatacaggatatcttatacatatatttttatgcaatatatacaaatttctttagtagtaatgaacagttaccgataatttatttcataccataagcactacattgtaaaaatcggctgcatttacgtttttattttttacaaaaaagaaaaggcttcataagaagccttttcaaatgtacatgttattatgtcaaaccgacaatacgctaatgctctactttgcgtaatccactatacgtgactcacgtattacattaacctttatctgacccggatactctaactcagactcaatctgcttagatatgtctctggccatgataaccatgtcggcgtcgctgacctgctcaggaactaccataatacgaatctctctacctgcctgaatagcaaaagatttctctacccctttataaccatttgtaatgtcctctaactgctgaagacgatttgaatatatctccaaagtctctcttcttgcacccggacgtgccgcactgattgtatcagctgcctgcacaagacatgcaataagtgactccggttcaacatcaccgtgatgtgattctactgcattaatcacaagtggtgactctttgtatttcttacataattcggcaccgagctggatatgtgaaccctccatctcgtgatctactgccttacctatatcatgtaataagcctgcacgctttgccattctgacatcctcaccaatttcagcagccagtaagccagtcagctgtgcaacctcgatagaatgctttaatgcattctgaccgtagcttgttctaaacttcatctttccaagaagacgcacaagctctgggtgaataccatgtatgcccacctcaagtgtggcagcctcaccctcttcacgaatcatattatcgacttctttctgagccttctcaaccatctcctctatacgggccggatggattcttccgtcaacaataagcttctcaagagctattcttgcaacctctcttctaattggatcaaagcttgacaagataactgcctcaggtgtgtcatctataatcagatctacacctgtcatagtctcgagagtacggatattacgtccctctcttcctatgatacgtcccttcatctcatcattcggaagcgatactactgaaatagtagtctcagacacatggtctgctgcacatttctgaatagctgtaaccacgtaatccttagccttacggtttgcctcttcctttgctttgttttccatttccttaatcatttttgcagtatcaagttttacatcttcttcaatggtctttaagagatattctttagcttgctcggaggttaatccagagattctttcaagttcctgtaaacgctgctcgttaagctttgatatttcaatcttctgcttcttgagttcctcttccttaactgcaaatccggcttcacgcttctcgatagcttcaagcttcttgtcgacattttcttccttctgaacgatacgacgctcattacgggaaatctcgtttctacgctctttgatttccttatccagatcattcttagcctttatagactcttccttgatctcaagcatagactcgcgcttcttttcctccgcagtctttacagcctcatcaatgattcctcttgccttctcctcagcatttcctatcttggagttagcagatttcttctcgtatgaagcggctgcaaaccatacaaccaatgcagtaataataatagaaactacagcagtaatgatatacggtagcattacaggagcacctcctttattaaattttcattgtatttcacaaattacaacaattaaattctatactttttggtgcaaattgtcaaggtaattgtgacctcattgcagaaagaatctggctgctcttaaagcccctgcgcataagaaactggtatatcctgcgaaactccttttcatcacagttatcaggatcatagtgtttcttttcaagcagctttgctatatgtttctcttcatcagcagtgtattcgctgtctatggcacaatttatatcatctctgcctatgccctttgccataagcttctgctcaagctgcctgcggcttaagctgtcctgatgatacctgacatatgtggaagcaaatctgtaatcatcaagataatgaaagctcttgacataatctattgctgcatccacacagcaatccggatatccgccctgtgtgagcttttccctaagctttctttcactcctgtccatctgttcaagcagatgcagtgctctctttttggctctctttcctaccacctcagttatcagcttttcgtaatccgtttcactgataaaggctccctccataatagagtaccgcacggcctctgtacggtacagcacacatgtcgtgccattatcaaaggtcgtgcggtatttgcctttaccaatattctcatatccggtaatctctatcatatataaccctgctcacttattgctcatctgcctctgacttttcagagtcttcctgtactgcagcatcttcatcctcaggctgtgtaaagtaaaaatcccttacctttgcctccagcatatcaaaaaatgccggattctcatggatataagtctttgcattctcacgaccctgtcctatcttgtctccctcgtatgcgtaccatgcaccggatttgttgacaatgcctgcatttactgcaagatcaagcacatctccttctcttgagataccctgtccaaacatgatatcaaactctgcctccctgaaaggaggagctattttattcttaacaacctttacgcggacatggttgccgactatctcaccgccctgcttgagtgactcagttcttctgacatcaagacgcactgatgaatagaactttaatgcccttccacctgtggtagtctcaggatttccaaacatcacacctaccttctcacgaagctgattgatgaatataacgatacaatttgatttactgataaccgccgtgagcttacggagtgcctggctcataagtctggcctgaagtccgacatgggaatcacccatatctccgtcaatctcggcctttggtacgagtgccgcaactgaatcgacaaccacgatatccacagcgcccgaacgcaccatggtctctgttatctcaagtgcctgctcaccgcagtccggctgtgaaatatagagattgtcaatatcaacacctatatttctggcatatacagggtcaagcgcatgctctgcatctataaagcctgcgatgccgcctcgcttctgtacctctgcaacacagtggagtgcaaccgttgtcttacctgatgactccggtccgtacacctcaataatcctgcccttcggaagacctccgagtcctaatgcaatatcaaggcttaatgagcctgtaggtactgtctctacattcatattggctgagttgtcaccaagcttcatgacagagccctttccgtattgtttctcaatctgcgcgatggcagcgtctaatgcttttaatttatcttcctttgccataataatctcctatcctctcgcgaacaaacgttcgttctgctattataataatacacttctattcaattgtcaacaaataaattggaataattacagaatcatatagctgcacgtgctgctgtttgtgcctcacgctatactctaaaacagctatagctaaaatactcaaaaatatacaaataaaacataattaaaaagacagttgctttcacaactgtcttcattatacacataatctctcactaacgtcaagtccaaattcaaccttgaaatccttacctagtttcttccaaactcagtaagcacaagtccgtcatttctatcgagtgtcatgccgatgctccactcattgatgaacaaaagaagcggattgcccttcatatcgacaaccttcttcatgtcgcttgttccgttaattgtatctacattgacctcatccttgttctcaatccatctgatatgctcatatggcagattctcaagtctgatctgcacattgtactcattttcaagtctgaatttaagcacgtcaaactgaagcacaccgaccacgccgactatgatttcttccatgccgcccttgtactcctggaacatctggatagcaccctcctgcgcaatctgtgtgacaccctttacaaactgctttctcttcatggaatcaacaagtgataccctcgcaaaatgctcaggtgcaaatgtcgggatgccctcaaactcaaatttatcctttgctgtcgtgagtgtatctcctatagagtatacgcccgggtcaaacacacctatgatgtcgcccgcatatgccttgtccactatttttctctcatctgccatcatctgctgcggctgtgaaagctttaggctcttgcctccctgcacatggtatacctccatgccggctgtaaactgtccggagcagattcgcataaatgctattctgtccctgtgatttttattcatgttggcctgaattttgaatacaaatgcagaaaaatcctctgaaaaaggatcaatcattccgatgtcagattgtcttgccgtcggtgcatatgtcatcttaaggaaatgctgtaaaaatgtctcaacaccaaagtttgtaagagcagagccgaaaaatacaggtgaaagctctccctttgtgacaagctccatatcaaaatcggcactggcgccatccagcagctcaatctcatccatgagctgacttttaaatttctctccgatctcatctgaaagagccagatcatctatatgaatgatcttctccgagccctcttttgtaccctttaaggtatctgcaaaggtcatgacctccttgctgtttctgtcatacacgcccttaaactgctttcctgagcctatcggccagttgataggacatgtcgcgatgcccagctctttttcgatgtcatcgagaagctcaaacgtatcgttggcatcacggtccatcttgtttatgaatgtaaaaatcgggatatgtctcatgacacagaccttaaagagctttctggtctgtgcctcaacacccttgctcgcatcaattaccatgactgccgaatcggctgccatgagtgtacggtatgtgtcctctgagaaatcctggtgtcccggtgtatcaaggatattgatgcaatatccgtcataattaaactgtaatacagatgaagtaaccgaaatacctctctgcttttctatttccatccagtctgaaacagcatgctttgccgtagcctttccctttaccgagccggcctggtttattgcccctccgtacaaaagaaacttctctgtcagagtagtctttcctgcatccggatgggaaattattgcaaatgttcttcttttttctatttcctgtcttaagttatccactgatatttcctccaaacaaaatcagagtatagtatagcttaaaacggttcccatttcaagacactaaaaatttatgtatcagtccatcgtcgatatgacaatatttgatgccccgatatttgtcttgcgcttgataatgtcctctatctgagctctcttttcatcagttacatcttcctttcccacaatcacatcacagcattcatcactgagacttaccacagcattcttaaacccctttgcctccagcatcatctgggcatcctcctccatctgtgcattttctgtcagcttcaccatggcatcgaccgcgctcttcttctctgcctctgacactcctgcatcatcgataatcttctgcagagcctccttgttctttgagcgcacctgctcgcgtcccagcttcacctgtgccacacactcctcgctctctgtggatgcacttgtcagtactgtttcgccggcatttaatatttcctctgtcgagtctgtctcaagcgcaacctcatctgatgcctgtgtatcctcacattccttagactcctttgtatctgcctttccatttacagcttcgatttcagtggaaagcacatcctttgcattcataaaggtatccctgttatcatagcttatgtaaccgaccactgccaaaagaagtgcaagtgtcgtaataattatctgatttttatggctgcctttcttcacttttattcctccctggatatcatttttgctatttttattttatgcatgggcacatcaaataatgcagaaaccgcattagaaatatcgttgtttacctgtgggcttcctccgccctgcgctaccacaagcactcctgaaacagtcggtttgtccgtgcttgtgacataaggtacgcttgcatcctcgtcatcgtatatgaccgtagtcttttcaatgctctccgaggtctccttagtatccttatccactatccttgtgccatcgtctgacagcgtaatcatcacagatacctcacccacaccgtccatcctttcaagaataccctcaagctttttttcaagcagtttctcatattcttcatcatcgcaggtgctttcacttactgacttggctttagctttcttttgtgaattactacaggtatttttatcctcttttaccggaagcaccacaataagaagcagtactccaacaagtaaaatcactatgtagtcagttttcttcagcttcgaaagccgtaaacaaatctgtcgtatccgcgtcatattcatacgaaatcccctctattttctttgtaagctcagcaaatctcatgtcatattcataccctgccgcaagaggctttagaataatgaccgccaaaaacaccccaagcacaaacctaaaatacctcctgtactgctcctttggcgttaaatatgtcattaccatgaaaaaaaatgccagatacaaataactcttcatgccctatcaacctcccataaagcttgtagatgcacatactatcgcaatcactataaaaaacaatatagatgcatctcttatcacgatataatacagatttcctgccctggcaacggcttctatgccatccacaatcctgctgtctgaaaccggctgcagcgcagcggaaagcaatctgtacatcagcgaaaagattagtgtttttacaagcggggtcagcacaataaaaaaaagcacgataatcgccgccataccaacactgttttttatgagcatcgcacagccaagcataatttcacctgcaccctgcccaagcctccccacacccggtatcgcctgaaaactttttaagataagactttccgatattttgtcctttgcgggagcaatcatggcctggactattcctattcctgccactatctttatggatgccttcattatttttgtaactgctgattcaataaactctgcaagcttttcaagcttcttttcacttgatacgtgattgagcacctcaagcaccagaaacagatgaattcccggtatgagcaccagctttataagccattccactacataaatgagcacaaatgccagcatgtaaaagcctgatgccgaaaatccttttccggacgcaagaagtactgtcgcatatgccggcacaagcgctgtaagataagtcaaaagcacatcaatacagccctttgccacatcagacaacacaaaaaaagatgccataagcattgatatgactgatgcatacataaacagaaagcttacattgtatacataatcctgccgccagaaaataagccttgaaaacaccataaaaagtatcgtatagcacagcacatttataataacaggcttcaccgccgctatctcataaaaaaacagctcataaatatactcacagattttttcaccggccttttgatctcctgccagaatggcatccactatatccgaaaacgatagtctgtccggcagataatcctttgaatatttttcaatctctgacatatctattttttcaagcatctgctgctcaattttatctgtaatttcggtgtccgacgcatacacaaaacactgcggcaaaaacactacagccaatatgattattatcaaaatatattttttacaaatcaaaacagctctccaatcagctctatcagacaagacatcaccggaattgacatcacaacaattgctcccttcgcaaaaagctctatctgcgatgcaattgcgctatgaccacagtccttacagattgaggatgaaaactccgcaatatatgcaatcccaagcatctttaccatagtgacaaaaaatgccggttccacaggaagctttgaaagaagtcctttaaaaaactcaattgtcgtgccgagccgctccaatgcaaaagcaaaaattatagtgccgcaggccactgaaagaagcattgaaagctcaggcctgtcacgctttaaaagcactgcaaaaaatactgccgcaattcctattatcccaatcttcaacatattacaaagaaaacatatcctgcattgccttaaacagctcacttatatatggcacaatccagaacaatacaataacaagcccggccagactaagcaggaaagtcatttcctcccttccactgtgttttaagacctgtccgagcaccgtaatcactattccaagtgctgctatcttaaaaataatcgaaatctccatcatcaagtcctttcatcgcatacaacaatatgtttaatcggattaccacatttttatacaaacatttttatataagcattattgatatcataatccctcccaaaatccccaccggacaaatcaccttcattttttcaacataatctttcctgtaaaaatctatctgtttatgtatgtccaaagcacattccttaagccgctgcttcatcgcagctgcatttttttcaaagaatgcacctcccatttcaactatcattttctttattttttcatcagataccctgccgcaaagcacagtcccccacacagccttccagccctcctctccacttttacagctcctgtttgaaagcacttctcccattctcctgcagccctcattaaacacctcgctctttcctcttatgctgttaaaaaactgtggtgccttcattctttctcctgccagataaaatgcccccttttcaagcaaaagcataaaatcatacagcatcgctatatctgcctttttccttttgctgtaatcgtttatcagccccgatactgcaaacagtactatacaaaagcctgtaagcttcatcataaatgctataacgcctcacccctttttcatcatggtctataaacacaaaccgttctatggcatgtggcagaatttttcttcgcagatcatctgcattggtgccatgcacactgccaagtatccttattccacaactcacaagctggtttagtgcctcgatatcgctttctcctcccagctcatccactgcaatcacatccggtgacatagagcgcaaaagcatcctcatgccaagtgacttcggacagttatccagcacatcactggaattgcctatatcgttttgagccactcccaagtagcacgctgctatctccgatcgctcatcaaccaccgacaccttaagagcgttttttccgtcacagccatctgaaagtatcctgatgcagtctcttaaaaatgttgtttttccttctcccggccgtgatataaccaatgtattgtaaatgctgttttcatcccggatataaggcatcagtggcattgcaacgtcccttatctgatgggcaattctgatatttaaggacgctatctcactgactgctgtaacctttcctccatcgcagcccatctgccctgcaattcccacacgatggcctccctccactgtaaaatagcctgctgcaagctgcggtgctatcgcgtggaatgaatatccgctcagataatttatcatctcctcaatatcgctatgtgagatatacactccggctctacatcctcccgcaaacatatactgcacctgctttccggcgcgcaccctgatttcctccaaaccacacggcatgtacgcctctgcctcagccttcatcttttgtggcagataatcaattatatccatatttttcactccttatcgccacttcggtggcaggtcgggatagggctcacgcgtgtggctgcagtgtcgcagaagctacgctgtgctattaagactctgtataaattatgcagtaagtacttctatgcctgacgaaaccgtcgatactcgccgtccgggctcgatatctccttgcctcggcgtccatgcctcggcatttctgtgcttcaaagcataatttaacagactctaaatagctccgctatgcgcttctgcgacactgcagccacacgcgtgagccctatcccgacctgccaccgactgttattcaaattaaaaaaaggacacagacgattctgataaatcatctatgtcctatttatattacatgtccaattgttttagaacgtgaaaattattattttttacatcctgtcaggagctgagaatccaagcatatctatacaagcctcaagtatctcctttgtgagcacaagcagcgaaatatatgacttcttaagttcttcattctcctcagaaagaatctttgtgtcatggtagaagccgttgaatgcgttggcaagctcgtagatgtatgcacatatcttgtgtggtgcagactcctcgtatgcactctcaattgtggcattgaactttgccagagagagcatgagattcttctgtcctgcattgactgccggcatgattgcatccttcagtgcgctgatgtcgccaccctttgcctcatactttgagaggattgacttgatacgcacgattgtataaaggatatatggacctgtgttaccctcaaaggatgtgaatctgtcgatatcaaagatgtaatccttgctcgcctgattagacaaatcaccatacttgactgctgcaagcgctacagttttggctgtctgctcagcctccgcctcgtcaatatttaaattctctttttccttctggttttccttaatcttattgagcatctcatcgtcaatttccttgaggaggtactcaagacgcattactccaccgtctcttgtcttgaaaggcttgccgtccttaccgttcattgttccaaagccgatatgtacaagctctgtagtatcaggtactatgcctgtctttcttgcgcagcggaacacctggataaagtgcattgactgacgtgcgtctgccagataaatcacacggtcagggttgttctccttcatacgcataacaagtgttgcaaggtctgtagtgctgtaaagtgaagctccgtcagactttaggatgatacatggcggaatctcctttgtatctgtatcctccttcacatccacaaccaaagcgccctcactcatatgtgcaaagcccttttccttcatcatttcaaccatcccaggtacatatggctgtgcatccgactcgcccttccacagctcaaaatgaacattcagattctcataatttctcttcagatctgttacagagacattcatgatgtgtgaaagcagtgcctgatagcctctcctgcctccctgaagctcttttgtggcaagaagtgctgcttccttgaagctctcatctgattttgacttgccgctggctgtcggatatatatcctcaagctcagatatggtaaacggtgcctccttcgggtactctcctgtatagctctcatcaaaataaacgaggtcaggctttctctcgcgaagctctgtgatgataagtcccatctgaagtccccagtcaccgagatgcacatcaccaatcacattgtgtcccatgaactttgcgatacgcttaacgctctctccgattactgctgaacgaaggtgtcctacatgaagaggctttgcaacgtttggtccgccgtaatccactactatagtgagtggctttttggccttctccaagccgtatctgccctcgtcatccttcatatcgttcatatattttgccagaaaagcggtatccattttgatattaagaaatcccggctttactgattctactgactcaaacatctcatctgactcaaggagcgccgctaccttgtctgagatcataaatggtgcacacttatactcttttgccgctgccattgctccgttacactggaactcacaaaggtccggtctgtttgaaagtgtaacctttccgtacttctcatcatatcctgcactgacgaatgcctttgtcacttcctctgatatcaaattaatcagttttttcattgtattcctcctgatatatagctgttttgcgtcaaacagcgaatatacttatattagcacacaaatgaattgctttcaatatcaaccgtcatttttgccttctgagtaaatattaaccggcaacgtaaccttgcatttgcaaccccaaaggagtatgatttcatatgaaaatttaaaggaggtcttatcaatgaagataaaaaccaaacaaataaccgttactgcaattatgctggcaatctgccttgtcagccagttttttaagaacttaagcgtatacatcacaggtccaatcattaatgcagctttaatacttaccgtactctatgccggaatggcatgtggcattatcctaagcattatcacacctgtcacatcatttttcatcacaggaagtcctgttatggcggctatccctgcgatgtttccatgtatcatgataggaaatatcattctagtggtatgtgtgggactgcttcgcaaaaaatgcggtaaagctgccggttttcctgtatcaattgcaataggtgccattctaaaggccgttttcatgggaatagccattgcacttatcattctacctgcatttctgcctgcaccaatgcacaagatgctgccggtattacagcttcagttttcagtgacacagcttatcaccgctgttatcggaggtgtatatgcagtcataattgcggctgtgcttaaaaaaacttctttagcacaggcagactaaatattcaattatctgcttatgcttccagatatccgtgcatatttttaagcgcatttttctcaagccttgatacctgtgcctgagagatatttatctcctctgccacctctatctgtgtcttgccttcgaaaaaacgcagcttaataatctgtctcgctctgtcatcaagcagctttaaggcatcgtcgagaaccagattttttacccatgcttcctctttgtttttcttgtccgatatctgatccatcacataaagtgtatcaccaccgtcagtatatacaggatcaaagagggaaagcggtgtctggattgcatcaagtgcgtatagtatatcgttttcggggataccgcaatcctttgatatttccgctaaggacggatcatgcaccagctttctcgatagcttttcctttgatttaatagcctgataagctgtatccctgagagaacgtggaatgcggtacgcactgttatcacgcagataccgtctcacctcaccgataatcatcggaacagcataggtggaaaacttaacacctatagtcggatcaaaattatcaattgatttcataagtccgatgcatcctatctgaaataaatcatccatattttcattatggtttgaaaaccttctgattaccgaaagcaccagccttaaatttccacgaatatatttttctcttgcagccttatctcccttttttattttctcaaacagttcttctttttcatcatccttaagtaccggcagttttgatgtggtcactccacatatatcaaccttatatacagacatgggaatcctccggataaatttctttatctaaagcattcccatttacagtaattttattcaattaatccgcgtatataattctacagcactgccgctatttttatatccttttcatccttaagcaccagcacactgttgtcttcaagcaatgtaactgtaggccttgaatacttctccgtcacaaaaattattttggcctttttgccgtttgtcaaaagcaccgtgcttccgatatatgagcttgcaatcttcttcaaaaacatccctatatacttcggatgatactttgatatgccatcatactcaaaatcttctatcacatcaaacggacacatcccatcacggtaacagcgctttgatgtcattgcatcgtagacatcggctatcgtaataatagctgatatatcatcgattttatctgctgtatatccaaacggatatcctgagccgtcaaacttctcatgatgtaaaagtgccgcacgcttcgtgctttcaagaatcttgaaattattaagtatctcatagccatataccgtgtgcttctttatcacctcaaactcttcctttgtgagctttcccggcttcaataatatctcatccggtatcttaaacttgcctatgtcgtgcaacagacctgccattgaaatctcatccagcttttctgtatcaagccctgcccacacaccaatgagacgtgcaataattgatacattcatggaatgcgccatagtagatacatctgtctgctttaatacctgaagtgcatcaaagagctcatatgaagtctcaaacctgtcaaaaatctctaccgagtccctgatgagcgtattcttatccgggatgatattcctgtatagtatgtcattcatatattcatgcaggttatcgatggaatcacggtatttttccttaatgatggcatattttttattccattcttctttttcctgtgctgagcttccctcaacataaaccgaagctatattgtagaatccaaactttgctatatcaaatgccgatacagcctgatgtcttttaaggataagctgtccctttggcgaaaacacatctactgccgtagtcattccctcttttagttcattaacctttatttctctcataatactgtttccctcttgtcatttatcttctcacttgcactcattataccacaatctctctaaatgggcactgattttatgtacttcttgacattcaaagcattttttgttaacatagcaaggcaaaaataaatgcgtcagttcgaaaccttcctgacgtaaaacaaaactaaaggagaactaaatatgagaaacaaaaaagtattatttgcagtacaggcagctatgattgcagcactctatgttgtgctcacgtatatcaccaatctgcttggtctcgcatcaggcaccattcaggtacgcttttctgaagcgctttgcatccttccggttttcacaccggcagccattccgggtcttttcatcggatgtctgatttccaatcttatcacaggcggcatcatctgggatatcatcttcggaagtatcgctacactgctcggtgcacttggcacttacttcctcagaaaaaagaagtttgtatacacgcttccacctgtcatcgccaacattattatcgtgccactcgtgctcagatacggatatggttttacaactatatacaagggtgttgatatctctcttcttttcaatgcagttactgtcggaatcggtgagattatctcaatctgtgtacttggaagcctgttaaaaggaatactttcgaaatacagaaatgtcattttcaagcaggacgaggcgtagttacatacatagcacttttaataagctgcgcgtcacaaaataaaaaaggggctgtaaaataagtccctaatataagaaacgccaattccggcaaatgtcggttttggcgtttctttgtattaacttttctatttctaagcaagtatgcatcttttgcaaagtttacagcacgatacggattctcatgatactttttgtccgtcgtttcttttttgtacatggtaaatttcatgtatttttccatgccgtgttcttcacaataaagataattattgtaagaaccgtatccggcatcagcaaccggatatttcggatagtgaccatatgtgcgattgaatttttccatcaaaggcacaaagcattccatatcggatgcatatggttttacgtcgattacagctatgtattcatcacagatggctgcctgtaggttgtatgccggaagtagctgatcgtttcccatgtaatcacgctttaaacgcatgaaagttgcatcatgatctgttttggaataactgtttctttcttctccacaggtctcgatgtgatatgcataggatttcaaacgttccagatattcatgcaattcttcgtattgtttttgtcgaatgctttttctacgaccacgtccggaaacgaaagaagtttcatccagtccggctgtttctttgtacatcgtaagtaattcagagacataatcaaccgcatacgcttcacgcttttcaaattttattccgagatatccaagtacttcctgattcatagcatcaatcaagagagaaatcttgtcaaagactttctgccggtttttcacacacgatttttttcatacccaggtatatcgattggcatttgcctcaatttttgtcccgtcaatgtatgtatgctgcagatccacgtgatctttggcaaaaatatatgaattaatgtcttcaaatatctgctcgatagaatcggttagttcgtttcggattaagtttccaaatgtagcaaaagaaggagttttcatgccatcaagaagatacatgtaacgaatgtcattacggcagagcttttcaatctctcgtaaagaacagatgccgttttccataaatgcaaaaagtataactttaagaagtttttgaacatcacatcttggacgacctgttttgtagcctttctctacaaaatatcttgataagtcaatgtgatccataacctcacaaaaagtgtataccggatcggaaatatcgatcaatttttcgatttctaatggtaatttcagctgacgcatagtataattaccattggtattattatttagtagcataattaattataccaaaaaatcgctcagacctcacggtctgggcgattttctgtcaggggagtttttttacagccccttttgttttttaccagacctaatgcagctgtcagttaatttttgtaagttattcctccctaaatttccatagcatctaccattatacttatttctctcttgcctgtatcctgatttgcatttgccacaaactcataaaccggacgataatatcccttcgaatccggtgtgtaacttatcttcactgattttacaactaaatcagataattgttcatctttatcataatccgggaaataaaattttcctgcacatagcctgtcataagcctctttttctgaaataacatctacctttttataaggcgtatattttatcatggagtctctgaaatttgcaattttacctgacgaattaatacaacattctatcgttcccttataatacaagccatcgtcaagaatttctccatcgtttgtaaacctatagtttcctgcatcatattcctcgattggtgcaaaaactgcgttttcgggaataaccactcctagattttccagcttttctctgacaaattcctctgaaagtccagcgtcagcatacgaattttcatcatctatatttgaaaaatccgtgaaacttactgttggtccttcgtaatcgcaccagatactcaggttactgccctcatcatcaaggctggtactgtaaaaaataatagtatcatcatatatgtctgtttttgagtcatctattaaaacaccatactttgaaaagtacccgtcggcaagctccctcgcctcatcttctgtagccctgtgaattgtgtatacatcaagcggatctgcctcatctgccagactcacaccatctgccatcgagacatccacattttgatttgaaatattatcgattgaaagattaccatattccatactattgtatacaataaaaacagctgcaaaagctataattgtaaacgcaagcggaagctgtgccaccagacattttcttatggaaatgttctgtctttcacaaacattttcatcatgtgccactccactgacttcatttgtattatcttggactttcttccttgaacagactgccacaaatatcagtcttgcaaccgaaaataatccatatccgatcattgcacctatcgtattatttatgatatcgtcagtttcaaatacacctcgtcccgtgataagctgcacaacctctataaacagtgcaaacccaaacccgcacaaatatattttccacgctcttttaatctttccaaaacaaattggtagtaaaaatccaaacggcacgaacatacatatattaagtatcagatttctccattcctgtgcactaaaattgtaccaggcctctttgtacgaagaaaatggtttaaagttagcccggtactcaaatcccccaaaaccaatacctcctcttagcaatgtcacataaagtacaacaacaatgtatactgcaagtacacacaccagtcctattctgccaattgaaatctgttttttaccatgcaatatttttttataaatcattttgtagcctaaaagccagattattgccaaaaaagccactacaatagtggcaaaaataatggcagactttcctaatctcataatatctgatattctcattacattctcctcatacactgcattttattcatctatatacaaattttaaagctgcgtgtctccgttaaaagtttattattctacgtctttaaccacttgctgcctgatgaatatatacgtttctaaaaaatctttataaaaatggtaccatatacattggaatataataaattccgttttcccatttgtaatcttttcttttaaaaaactggtttatccatgcataaatccaccttttcgccacaattataacacaaatcccctttcatgtaaatctgaattatagtcaaattcctattagttttctcgcgtttttaacgcatatccccctttgattttcctggctattaaatttacatctatttcttcatcttctcattatgtacatatatcacagttcttacacaaaaatagtatcacatatttttattaaagtatcctgtctcttcccacaccttcttatctggacaataataactatattctcttgaatttccaactttcattgctgttccaaattttaatattccttgttgtatgccaattcttatatattatgcatcctttccaattgctttagcaatctctgcgataggcacatttctatgtgttacctgttagttaccggaacattttcgtgtgttttgaaggtgtctgatagattttcagaatataaagaaaaccccgaaaatacaggattttcggggtctgttgctctttttcgatattcggttgaattatctctttgttaacgttttgatatcctaaaaagcccataaataggggatttgtgtgtcccagtgttgcatatatgttgtatgcgattgactgcccacacattccctttttgctttattactttgatatgctgtgattacattctatctatcccacttgtcacacagcgcatttatctggtctgcaaacttgctcaagtccttattagccataccctggcacttctggataacagatacaagcctctggcctgctgccacaagacggtcaaatatagtcttctctctgcttgccatgccatatgcagcctttttctccacaagcttgcgggagccatctgccaccttctgattcgtgataaggtcataggcatcaccactgtatggtgccactgcatcatagccgaaggtctcatgcacatggttggcaaaggattctgctgtggattcctctccatgaactataaatacatgctccggcttgttttttattgcgccaagccactcggtaagctgatttttgtctgcatgtccactgatacccggcagatttactatgcttgcccttacttctatttcctcaccaaaaagcttcacctttttagcaccgtttaaaagtgcatagccaagtgtgcccggaacctgatatcctacaaataaaactgttgaatcacttctccaaagattatgctttaagtggtgtctgatacgtccggcctcacacatacccgatgctgagatgataacctttggcttcttatcgaaattaatcatctttgactcatccgatgatactgccacacgaagtccggggaacttgattggattgatgcctgccgaaataagctccatagcctcctcatcaaagcagtccgatacattctcatgaaatacatttgtcgcctcaacagcaagggggctatcgatgtaaacctcaaaattcggatgctccggcagcagattctcagtctttatacgcctgataaagtagagcatctcctgtgtcctgcccactgaaaatgccgggattaccagatttccgcctcttgtaaatgtcgcattgatgacctttgcaagctccaccgcgtagtcaggcggcgtatcgtgcagacgattgccatatgtagattccataaccacataatcagcactgtccacatactgcggatccttgatgagtggcctgttgtgatttccgatatcacctgaaaagacaatctttttggtcacattctcctcagtcacccacatctcaatggatgatgaaccaagcagatgacctgcatccacaaatctcaccttaagccccgggcatatctcatacacactgttgtaatcacacggtgtaaagtgctgcatgacattctgtgcatcctccacattgtacataggagtcacttccggtcttccggctcgtcttgcctttctgttcttccactccgcctcaaattcctgaatatgtgcagaatcctttagcatgatgttacataaatctgttgtcgcctttgtcgcaaaaatggtgcccctgaaaccatgattgtatatgagtggcaaaagacctgagtggtcaatgtgtgcgtgtgtgacaaacacatagtctatgagcgaaggattgaccggtatctcctgattcacgtacaaatcagctccctgctccattccacagtcaataagtatatgtgtgtccccaaatgtcagatagtgacagcttccagtaacctctctgtcagcaccgataaattccaataccatactaccatctcctattctgttttatgataaaaatattataccacacttatgccattttctgtatttctttcttcaatcttgccattatttttttttcgagccttgatatgtatgactgtgaaattccaaggatgtctgccacctccttctgcgtcagctccttattctccacacggtttactccaaatcgaagctctattatctgtctttcacgctcgttcaatgacagcatggctttttttagcagtgatatctcaacctcagtctcgagatccttatatatgacatcctcatccgtccccagtatatctgataaaagcagctcatttccgtcccaatccgtgtttagcggctcgtcaaaggatacctcaagcttcactctgttgttgcggcgcagatacataagaatctcattttctatgcatctggatgcgtatgtggcaagctttattttcttctcaggattgaatgtgtttatcccctttatgagaccgattgtgccaattgatataaggtcctccacgcatactcccgtgttttcaaattttttagccagatacaccacaagccttagattgtgctctataagctgcttttttgcctgttcctttgacattgccacatttttatccaccagtgcaatcagacagcacttctcctcgtctgtctcaagcggaggcggcagcacctccgtccctcctatgtaaaacacctcatttgtgtgcggcttatttccccagagtattttccatacccgttttattactaaaaacagcttcattcaaaatcatatcatatgcattgtcctcaaataaactatccgatgctcttcccaccagcacattatgtaaaatcagcttaccatttcccttcatgactgtcatctcatcaaattcacacactttaatgcttccaccatcatttcccaggctcttgtacggcacatcaaaaaagctgacatcttctcctacaatatcaaacaatgcactcccgcctatgtgcaccggaatctgctgtggctgtttttttagcagatttcccgtatcatacaaggctgtggcacaagctcttttaccatcctttaggagtgtgaccctatatagtcttctgctctcattacttcgctcgcagaagcactttaacactatgtatgatatgacaaaaccaaagcatatcataactgtcgcatcagagctgaaaaagctgtccagagctgttactatgcctccggtcagcactgttacaaacatacatagtgcaaaaagtcttagaaacgggatttttctgccagcctgtctgcctattgcaagccttgccgcaagcggtacgaccaccagaacagaggtccatttataaaacgcatagctgcctgccaaaagaagcagtacacattcacataccgatgcacccaccgcagaagcaatcagacgtaccaccttcccggtcaacgggatttttagcatatatatgacaaatataagtatgagacagttggtgataaatgtacgaagaagaaaaatatcgagataaaatgcatagataatttttcacctcactttcacagacaagaatagcgtaaaagcaggtttttaagtgccgtaatatgtcgacaataagcaaaaaagacatgcagcccaaaagctgcatgtcctataaactatcgtcttgaattcttaaggaaatccggaatattaatctctacaggcttaaccgtgctctcaggctggcgtggcttctggatacctgtatatgcatgtgcaggtgctgtctgctgtggctgggcagctgtatgaagtccgcttgttgctgttgtgtgaagccctgctgttgctgtggattgtgttcccatgcctgaaacaggtcttgcagctgtctgattcggatataccatacggttttgcataccgcctgccattcctgcaccaggcgctgcctgcttgcccggcatatctatcttctctgaaacatcctccagtcctgtagcaataacagtgatagaagcctgatcagtcatgctctcatcaaacttggcaccaaagataatattggcattctctcctgccagatcctgtacatagcttgctgcatcgtttgcatccataagggagatatctcctgagatattgataatgacatgtgttgcaccatttatctttgtctcaagaagaggtgaagcaaccgcaagcttaacagcttcgatagccttatcatccccctgtgcactaccgataccgatatgtgccatacccttgtccttcatgacagtctgtacatctgcgaagtcaaggttgataagtgcaggaagattaataagatcagtgattccctgaactgcctgctgcaatacctcatctgccttcttgagtgcatccggcattgttgtgcgacggtctactatctcaagaagcttatcatttggaatgacaataagtgtatcaacgctctccttaagtctctctattcctgaaacagcattaatcattcgctgctttgcctcaaatttgaatggctttgtaacaacaccaactgtaagtataccctgatcctttgctatctttgcaacaacaggagctgcacctgtaccggttccgcctcccataccgcatgtgacgaataccatatcagcgccctttactgctgcctgaagctcctctgcgctctcctcagcggccttctgaccgatctcaggctgcgcacctgcgccgagtccctttgtaagcttctctccaatctgtataagtgtaggagccttacaaagctgtaaagcctgcttatctgtattgataccgataaactctactccaccaatattctcatcaatcattctgttaactgcattgttaccggctcctccgactccaatgacaataatctttgcgctgttatcagcctcgttagttcttatctcaagcaaggtgattcctcctctttctttcccaaaatttaattttctatataaaaatatcgaatattcttaaactcatttattctataatataatttttctccaaaataatcaactataaaatatgattttttttatttagtttttcattattctgacttgtcaaacacaatatttgttgtttcttccgtccagctctctaaatgtagtgtaccggactgtccctcaagcgatggcatgatagccttaagcctctctattttacgtgtaagctttgtcgtgtcaccaattatcacgctcacattaccatacttggctaccggtgcattttgcgcaccataatccacagaatccggcacaaggtcctgcctttttaatccctgtgtaagctcaaggatatcttttagcatagtctgctttataggcagcttctcataaagcactaccttgtcacagcttatgccgtctatacatggcacacccggcaccgtgtctgaggatgtctccaccacaaagccatccttatcaaaatatgcattctcattaattcccggaatatatatgtatccaagcattcctttttcataaactgatatatgaagagtatgcggactatccaggcttatgctcattgtatcaataaacggtatttttttagtatcctttaccttatatttcagatagacatacagtgagttccatgagtacttatcattaagcaccgcatcctctatagtcttttggtcgtaaagctcattgccctcgacaactaccttttttaccgtaaacagcttaagtgcaatgagaaacagtatcgcgagcactgctatcgtaattagcagtcccataaaaaaatgctttaatctctttttatgttttctttttttcttaatcattatatttcacgccttaatctacacattttcaagcctgatgcctcttgacacagacaaaacaagccctatttccgccatcaggaatatgattgacgtacctccatagctgataaacggcagaataacaccggtatttggaagtgaattggtaactaccgcaatattcagtatcacctggattgcaatatgactcatcacaccaatcactaaaagcgagccatacaaatcccttgcattgtttgcaatgaccatcatacgccatataagcagtataaaaagcaaaataaggcagatagctccaaacagtccaagctcttcacaaataattgtaaatatcatatcattttgtgactccggcacattgccaagcttctgtaagctctctccaagtccttttccaaacaatccgcccgagcctatcgcataaagtcccatcatagtctggaatactgcgtctgttcccgcagtctccggatgcagccatgcctcaatacgtgtacttctatagcctgccagcatgacaaacgccaccgcaaacacaactaccgccactgccacaataataaactgcagatactttgggcttgcgacaaacaacatgcagaccgaaatgcctatgatgataactgccgtactcagattgctgattgcaacaactattatgagcggaataagcatagcaagcacctttaccagacttaaaaatttatcaaactgcttgggtatcttgtctataatcatagccataaacagtatgaccgcaattttagccacttctgaaggctggaactgtattggtcctatgccaatccatctcgatgaaccatgtgagcttgagcctatttttggcacaaacacaagcacacacagtataagcgatgctatatacgcaaaaaagccaagctttttccaatatctgtagtcgacctttgccagaaataccataggtataagtcccagtacaatatttcgtatctgaagcttaagatagtgcatgctgtcatgatttttgatggccgatgtgtatgcactcgagctatatagcataacaagaccaaagcagagcagaaatataactataaacaacaggttgtagtcgaaataaggtattcctttttcttttttttctttattcttgctacttcttctacgctttcctgccaaaatatttactccttaaatccttttactatttccttaaagatacgtccgcgctcctcatagttaggaaacatgccccagcttgcacatgcaggtgataagagcactgcatcacctgaaacagcatgctcatagcaataatttactgcatcctcaaacgtatccttctttacagtattcatgaatccgtgtctgtgtgcacactcttcgattttatctgcagtctgaccgataagcacaagctcctttactttgccgtcaaaggcctctatccactcatcatactccgactgcttatcatatccaccgccaatgagaagtgtcggtctgttcatggcacgtataccctgaatggctgcatcaggattggtgccctttgaatcgttgtagaatctgactccacgcttttctgtcacgtactctatcctgtgctcaactgccttaaataccttaagcacctcgacaatcttatccatcggtaccccaaagcttatagacatggcacacgctgccattacattctcaaaattatgctttccaaggagattcagctcgtttacatcaattacctcatcgcgtacaccgtcgtgtgcgtatatgatgatatctccgtccagataaaagccctctgaaagctcagacttactgctgaaaaatataaccttagcagggcactttgctgcaaaatctctaagcacctcgtcctcgtaatttaacacgcagtaatcatctgctgtctgattttttgtgatatcctcctttgccctgatgtaattttccatagtatggtgtcgattcaggtgatcgggtgtgatatttaaaattgcgcttacatgtggcttaaaggtatctattgtctcgagctggaagcttgatatctctgcaaccgttactgtctcacctgtgcttcctgtgaccattgatgtataagggattccgatatttcctaccactctcacatccttaaagtaattcttcattatctcacctgtcagggctgtagtggtcgtctttccgttggttcctgtgatagcgatgatctcacctgccccaaatgtgtatgcaagctctatctcaccccatattttaacgcccctgtcacgtaaggaattgaccataggaatgtctgttggtactcccggacttagcacagccacatcaaactcatcaatctgttcatctgtcaggtcgcctaaaataagcggcacctccttaagctttggtgctttctcataaagtgtttttgaatccagttctttatttccatcaaacaatactgtatcgatgccatttgcgcacaaaagttcagtcgctgcaatgccactctttcctgttccgacaacaagtaccttttttccttgtaagctcatttttattcctccatcttttattgcagccatccgtatggatatgtttaacaaatcaaattctccaaacgactgccttaatcattaaattatagtatacgttatttagttctatttcgcaagagcccgtaaatcagttacacactcctatctcctgtgcatacggtatgatttccctaaatatttcagctgcaaccggtgcagcgattgttccgccatagtacgcaccgccctttggattatttattttcacaagcaccataagtgccggatcatccaccggataaaacccaaggaacgaggctatatatacattgtcacttctcggaagtgtctgcgatgtagcagtctttcctcctatcgcataaccttcaacctttgcattttttcctgagccctctgctaccacgccctccaaaagctttcgcagtgtatcagaggtctcttcactgcatatacctgacgtctgttcaaaggacagcacctcttttaccgtgccttcggtgccatgaatctccttacctatatgaggagtaattctgttaccaccatttataagcgatgatactgttgtcataagctcgatgggtgtgagctggaatgactgtccaaatgaaattgttgcaagctccacctggcctatcttatccggctgatgcattatggtggcggcctctcccggcaaatcaatacctgtcttatcaagcagaccaaacctcatgaaatcagcataatacctctcactgcctattctaaggcctaaatcaataaagaccggattgcatgaattctgtattccctgcacaaaggtctcacttccatgtcctgttctcttatggcagtgtatgcgtctgtcctccacagtaatatatcccgggcagtaaaagcggtcatcaaggctcaccacatcctcctccagtgcgattcctgccgtaattatcttgaatactgaaccgggctcatatgtatcacttacacatccgtttctccaggcttcatcatggttttcacatgaaaaaggatcattcaaattatattccgggtagtcggtcatggcatatatttctccatttttagggtttaaggcaattatactcacactgtctgccagattttgtgcatatgccatcattgcatttttctcacatactctttgtatatttatgtcgagtgtagtgacaagtgtgtctcctttttgtggagcttctcttctctccttgtagcccttcacctccacacctctgccatcacatacagtgtatatccgcccgggtgtgccacgcagaatttcatcatatgtggtctcaagcccaacaacaccctgaccatctgctcctgcaaagcctataacctttgaaaacaactcattaagcggatagtacctgacacttgactcgtcaacctttacccctgccaagccatatgatagtattttatcgcctgtttttttagaaacattgttctttattttttcaatggatgtaaccttatccaccttactgcggatagtcttttcgtcaatcgaaagctcactgcttaaaacagagatgactgcttccttgtcggttatctgattgtgtataacgcttatgttatatgcagtttcatttgtcgctattatcctttcatttctatccactatatctccgcgtattcctgcaatatcacgctctctttcctgaagcgcacttgcctttttactgtaataatcgccttttactatcatgagataaaacagcctgaaacacaaggcgataagaacagctgtcagtatactgcaaaatacgcatatttttcttctgtagcgcgtattgttaagtatcataaacaaaaatgcctcaatatttttacactaatatatgcaaaaaatattgaggctattctctattcgccctgctcaccctcctgggtgaccttttctcctgtcggaggatttgtgcctgttatcgtaaggtcagcatttacaccggtctgttcctcatcagggtatatattcatatacggaagtacttcctttaatatctctctggtcaggttctgtgcatagttactgtgaggctgatcctgtacattcggctggtcgattacagtgtaaataacaagctgcggatcctgcgcaggcacacagcctataaatgatacaagatagctgcccttctttctaaggtgcgttgtctcatcatacatctgtgctgttcctgtcttgcctcccattgagtatccgtcaacctttgccaccttaccggttccgtttgcaactacgttctgcaggtagtttttaagtgtcgcacttgtattctctgacactgtcttttttagcagtgtaggctcaattgtctttactgtattgccgttgtcatctgcgattttctttactacgtgcggctgacaataattgccgccattcaccagtgaagaaaatgcactgaccatctctatcatggtacagttatagttctgtccgaatacgtttgtcgctaaatcgacaggctttatattgtcgagtgtatacatgagcgttgatgtattagcctcacccggcaggtcaacacctgtcttttgaccaaagccaaatacactctgatagtacagaaaattttctgcaccaatcttatatgacatctgcatgagtgcatcattacatgaatccataagtgccttttcaagtgtctctatgccatgtccgctacggttgacgcatgataccttttcaccgccaaacatctcgtatccatcacataaaaatgtcatatcagtagtgagcgtgcctgtatccagtccacatgccacggtaaaaggcttctgtacagaccccggctcatatgtatgtgtaacacagaagttctgccacagcttatttagtgcatccatctcctgagtactgtcctttttaaatgccgcaagctgttcctcgctgtaatatgcactcatatcccttggattgttcaaatcaaaattcggataattcgccatggccagtatctcaccatttttaggattttctataacgactgcaatattttctgcgccaagtccttctcttgcattatttgcataagtatcggagaacagctttatcttgttctcaacaatcgactggatatttgcgtctatagttgtgtacagtgtatttccgttttgtgcagcaattactgtcttctggaaatcattgtctgcattcagatagccgtactccctgccatttacaccatttaaagtgtcattgtaatagttttcgagcccggttgtacctacatttccggcggaggtaaaaccgataactgagcttgccagtgttttaaacggataatttctctgatactctgtctcaaaccacacacccttgatgtttgggttcttcagattgcccttttcgtcagttgcatcctgcagctgtacaaatggctgaattgcatcatatgacagcttttttaacagtacaatatatttgttatccttgctgttatttgcataatcctcaagtgttgccctgtctaaatccggaaagcactgtgtcagtgcatctatcgtcggagttatatactctttcttactggtcataaccgagcaatcaagtacaacattataaacagccacactcgtagcaagcactgtgccgtttgaatctacaatatttcctctctgaaacggtattgttttgctgtcatatgactgtaatgatagtacctttttagtatatgcgtctccgcttgtatattcaataaacatcagcctgccaatgagtccaagcatggctacaactattaacataaacaacgcaaacagctttgttttcattttgcgtccgatttttcttaccggtctttttcttgtcctggctgccaatatgattcctccaatttattcagggatatcactgtactgatccatatagttgttcttatcaactgagtaataaactatctgatcctgtgaagcatatttcataccaagtctgttgatagctgcatccttgattgcatttaaatcgacagatgtagtaatctgcttgtatctggcatcattatcagccttcatatcatttatctggctctcaagtgctgcaacctccttcatctgctgtgtcacatttgaccttatctgaataagtgaaacagatacaaaggctgaagctgccacacacgctgtgagaaaggctacaaatgccctgttcattgagagtgctctctcctgatttcttcttgcagatgttcttctgtttttctttcttcttatttcctcaagctctcttgtcgatttctgtggtcttctgaccggtgctgcctcgtcaagctctcttacggcattcccatttatataataagtagttttattcatttagctgctccttttgctgtcattctacaaatcattcttttcaaacacacgaagctttgcactcttcgagcgtgaattctcttcaagttccttttctgacggaaggataggttttcttgtgataaccgttcccttcgatttattaccgcatacacataccggaaaactcggtggacatgtacatggattttcgttttttttgaaattggattttactattctgtcctcaagcgagtggaatgtgattatacatatcctgccgcccggattaagtaaatctatcatgtcatccaggttgtcccttagcacatcaagctcatgattcagctcaattctgatagcctgatatgttctctttgacgggtgacctccggtagctctgaccttttgtggtattgctgcctttattatctcgttgagctctcctgttgtcgttatctcttgcttttgtcttgctgctacaatgtgctttgcaatattctttgcaaacttgtcctcaccgtaatccctgataatacggtacagatcattttcgctgtaggtatttactatatcccttgcagtaagggaattcctgtcatccatacgcatatcaagcggtgcatcctcactcctgtaggtaaagcctctctttggtgtatcaagctggaaggatgacactccaagatccagcataataccatccaccttttcaattccgagtgaatgaagcacattcttcatatcagaataattgcttctgactatcgttaccctgtctccaaactccgcaagtctctctcctgccgcctttatggcatctgcatcctgatctatgcctatcagcctgcccttgtccgaaagtctctttgctatctcatatgagtgcccggctcctccgagagtaccatccacatatatcccgtcaggacggatgtttaaattttcaattgtctcgtcccttaagactgaataatgcttaaattccatgtggtctctccatttaaaatcaaattcctatgccaagctctgccatatgatctgctatctcatccatatcgtcaaaatcagagttttcaaggtatctgtccttgctccagatttctactctgctgtatactccgacagatactacttccttatctatacctgcgtattctcttaagttcgccggtaagaggattctgccctgcttgtccacctcacaggtggctgctcctgcaaaaaagaatctcataaattttcttgcttctcttgatgtgagtggtttgtcgcgaagattttcctcaatgcgatgccattcttcgttggaatagacgaacagacagccatctaagcccttggtaactacaaactcattaccaagctgttcacggaacttcgccgggacaatcatacggcccttggcgtctattgaatgattatattcgcccatgaacatggcatccatcctccttttcctcattttgaagctacccaccacttcactccacttatatggtatttcgctccactttccaccacttgtttacaatattacacctaacagcctacaaaatcaaggctttaagccaaattaccataaaaaagcatcaaaaaagacgctaagtcttttcgtggactttgcgtcttttttataaaatacatatgaaatttactctttagtggtggattgtggtggagtgtccaccattttacccattttcatctgcttatatctgacaatacctatccatatggctgatactgccaccaaagtggcggcaagtgccatagacaccggataattgatatgtgggatgagaagctggtctgtacgcaggctttctatccagaatcttccgataccatagcctaacaaatatagaagaaacacctctccgtcaaaccttctgtgcttaaaataaagcatcaacaaaataaataagcacaggttccaaaaggattcatacaaaaatgtaggatgcaccgagatatactccactccgtctaccacagttgtatgtgacataagcttttcagtcagatccgatgtcctgacagctgataccggaagctgcatggcaaaaagtccgtcataataatcgccaaatgcctccctgttacagaagtttccccatcggccaatcgcctgtcccagtatcagtccaagccccgccgtatcacacaacagtggaaacgacagctttctgacctttgcaaaaacgaatgtggtgataattgctgctatcactcctccgtaaattgccagtcctccctgcctgatattgaatatgctaagcaggtcatccttgtacagatcccacctgaatactacatagtatattcttgcgcctatcaccgagcatatgattgccacaagtgccagatcaaagtatgtatcaggattttgtcctgattttttggccacatagcaggccacacccagccccgcaagcataccacatgctattattatgccgtacatcgcaatatcaaagcttcctattgatatgctctttatcacatgctgcagatatatatgaagatgtgggaaatttatattataatccatatttttcctttcctgactgtaattgctgtctatcacaccataatatatacggcagcaatcacaaattacgaaaatatatgtacccggagcaccataaacctgatactccgggcaactgtcattatgcgcttcttagtctacgcctgacactcaaagcttgcacactctgtactgcacttgtttggtgtacagtttttcttgatgccaatctgattggccatgcagctattgtgatcattgtacttacactttgccgcatcacagtgcacatctgtctccttgtgaatagctaactctgcagatacctcacagtcacaggccttgtttgaaaagctgccacactgtgtatcgcaggctttctttgccttagttcctttcacatcgatttctctgagcttacagcagttatctgcattatacgcacatttttcaacattacaatcaagtcttgtcatacttttgcctcctttgcttatgcataggctagtatgtcctgattgattttttttatgctttttaattaattatctgtgtttttcctcttccggaagctccactctgatttcctttgtacggatttccttgcaaatctggtcgatgaaatctgaaagtggcttaacaccctcatttccttcaaaacggcttcttaccgatactgtgccgtctgcctcctcgtcagctccgacaacaagcatatatggaagcttatccatacgagcctctctgatcttgtatccgatcttctcagctctgttgtcaactgtcacatcgacatcattgcgcttaagctcatctgctacctttttagcataatcagcatacttctctgagataggaagtactcttacctgctcagggcagagccatgtagggaacttgcctgcgtagtgctcgataagccatgcaagtgtacgctcatagcagccgagtgatgtacggtggatgatgtatggacggattttatcgccgttttgatcaatatagtacagatcaaaattctcagcaatagcacagtcgagctgtattgttaccatggtatcctctttaccgtatacgttcttggcctggatatcaatctttggtccgtagaatgcagcctcgccatcggcctcaacaaaaggaacattttcctcaataaggatgttacgaagaacctcctgtgttgagttccagtactcatcatctcctaaatacttttctgtgttctttggatcccattttgaaagacggtatgtcacatcattctcgagtcccagcaccttaaggacatatctgttaagattgaagcatgccttgagctcctcctcacactggtcaggacggataacattgtgaccctctgagatagtaaactgtctgacacgtgtcagtccgtgcatctctcccgaatcctcgtttctaaacagtgtggatgtctcacccattctgtaaggcagatctctgtatgagtgctgctttgccttgtatacataatactggaacggacatgtcatcgggcgaagtgccataacctcttcctcgccgtccttctcaggatctccgagaacaaacatgccgtcaagataatgatcccagtgtcctgaaatcttgtacaggtctgattttgccatgagtggtgtctttgtacgcacatagccccactccttatcctcgaggtcctcaatccatctctgcagcttcataatcatctttgtgccctttggcatcataagcgggagtccctgtccgattacatctactgttgtgaaaagctccatctcacggccaagcttattgtgatcacgcttcttagcctcctccattctctcaagatgtgcctttaaatcctctttcttattgtaggctgttccgtagatacgatggagtcttgccttgtttgaatcacctctccagtatgccattgatgatgctgtgagcttgaaagcctttactccctttgtgctcataagatgtggtcctgcacataaatctacaaatccaccctggtcatagaatgaaatctcctcaccctcaggaagctcctcgataagctctaccttgtatggctcatccttttccttcatgaatttgattgcttcctctctagggagtgtaaatcttgttatctcatgaccctgtttgatgattttcttcatctctgcctcaagtgcatcgagatcctctcttgagaatggctgtgaatcgaaatcatagtagaaaccatcgtcaattgccggtccgattgtgatttttgcatccgggaacagattcttaactgcctgtgccagcacgtgtgatgctgtatgtctgataacacgaagtccttcctcatcacttgctgtgattatattgagtgtgcagtccttgtcaagaactgttcttaagtcaacaatttctccgtcaacctctcctgcgcaggctgctcttgcaagtccctcgcttatatcttttgcgatttcatatacgctttttgcttcgctgtactcttttgatgagccatccttcaatgttatcttcatggttatctctcctttatttttaatataaaaatccccgacaccgcattgctgcgacatcggggacgataagctttgttaccgtggttccacccacattctttccgcctgaaaacatactgcttgtctgtatccgacagaaactcatttgactataacggtgtcaccgggctttattggagccactccaagctggtgttcggtatatcatccaccggggagctttcaccactctttggactttgattctcgtcttccaaggcttccctctctgctgcttttaatatacttactgtgctcttcaacgtattgttattatgctaatgttcctttcaaaaaatgataatatacttatttttctaatctgtaaagtactttatgcattttttccgcaacattttttatatttcttgcccgaaccgcatggacatgggtcatttcggccgattttcttgcctactaccactgttcctgacttcttctgctcgaggtaaagcgcatgctttgtctctgcgtcaaagatttcatcccatgccgggagattgtaaagccagtctgcctttgcatctaccatgttcttataaagcttttctttatcgaatgcaaggcttacctttgtgtcctcatccatctcctcgattgggtttggtgtgacaaggctgtcattgattccgtctaagaagcctgtcatctccatgattgataactcatatttctcagcaagctctttgactgttccctctactgcctcatccggatttgcaaggagcttctcatatacacccttctccaagaggaaataatgctgccaaaaacgctgtaactctccctgatctgctttgtcattgtaggcaatcttgtgccactcttctaataaagccatttttactaccacctttatcttttataaactgatatgaggccaaacagcctcaacttcacatatggatgtattataccaaaataacagcttgacgtcaattttgtttttttatattataattattaaataactattcaaaaaccacggagaacaattcatgaaaaagacaaaacgtattctggcactgattggcgccatccttttattacttttatatgttgtggcatttgttgccactgtgctcgatcacacaagtgacatgcgctactggaaggctgccgttgccgcaactatcattatcccggtgcttatctgggcgtattcatttgtatacagacttttaaagggttctgataaagaatctgatgatgtaaccaaaaaaccatgaaacgcaaaatcacacctgaattatcatctaaagactggaaggaattctgcagccgttttcattttgataacgataaactgccgcttatccgggcaatatacaccgcaatgcttccattggtggatgcctttgcatattattccataaaacaggatttgcccggggtatccctggcacactatgcctacggcctcgtgacactcggaaacggtgtagacgagctgtcagagctgtatttaaaccatgagcagcttgaggaagcatacatagcagactgtttaagcctcatgcttttgtcaaacgcatatgagcagtttgcaaaggctgtcgaagaagaaagctctctttatgccattgagctgtcatttttaggcgatgaatatccgcttgagctgctgcctgagatttttgagcacgtaagccctgatagcatacatctcaccggttcaaatatgctcatgccacttaagacagccgccctcataataaagcttgactcacaaaagcagaaaaatatcaaagagctctgcaatacctgcgcaaactgtaaaaatctgtcgtgcccatcaagaaaggcccctggtcctaagctgccacacacctatggtgccatgcagatttttaatatcagacattgaagcccttctttttctcgtatgagcctctcaatttctcaaccagaagtgtaagattcctaaacagtgactcagccgcaaagccaaacactatcatgagaagaatacatatatttgacaaatccgtcagtgcaaacagtttctttaagaagaaacccgaaaataccagacctgctatatttccgataataacagcatatttcattccattgagtggctcactgattttaaagagaatcatgaagcccactaccgaaagtacaagcgtcgctatcgttcctatgcttgcatctgatatacaaaatacttctccgcatacgacaagcgctccgacagctattacatccgtaagtccacccggcagtgcctttagcatgacattggtgataaagtgcccctttatcctgtccttattctgctccagtgccaataagaatcccggtactcctatggtaaacatactgatgagcgatacctgtgccggctcaagcggatacgtaaccataagaataactgaaaacagtgaaagtaacagtgagaatatatttttcacaagaaacagactggctgagcgctggatattgtttaccaccctgcggccctcatacaccacatccggcatatgtgcaaagtcagagtccaaaaggacaacctgggctgcctgggctgccgcctcacttcccgatgccatagccacactgcagtcggcatccttcatggcaagtatatcgttgactccgtctcctgtcatcgcaaccgtatgctcttttgcctgcaaagcctttacaagctgtttcttctgctttggtgtcacacgtccgaatacagtatatttatttactgcatcggctattttatcctcagtatcgagtgttgccgcatcgacaaagctttctgcactttctattcctgcctgtatggcaatccttgaaacggtacgcggattgtcacctgaaataacctttatcgcaacaccctgactcttgaaatactcaaaggtctttaccgcattctctctgataggattggcaagtgccacaaatccaagcggagtaacgctgccatttatgccattctccacgttttctccatcataccttgcaaacaaaagtactctgtcacctttgtcagcgtatggtattatttcttcctcaatgcgcgcaaagtcttcgtgcatgataaactccggtgctccgagcagatatgttccatcagaaaaagtaacgctgccatacttgaggctcgacgagaatgcctgctgtgaaaccgctgtacgatgcagtgcagatgtattatttgtcaaagcatccgccgcatatgcttttagtgcgagcatagtcgcattgttgtcaaccgaagcatttgcataatctaaaataagactcttaagctcatctaacgtcaaagctgtctgtgtgccatctgctccactgtttttacagagaaaaatttccttaagcttcatatcgggctcagtaattgtgcccgttttatccacacaaagcacatccacacgcgcaagcgtctcaatacttttcatatcatgaagcaaaacctttttccttgcaagcttcatagtgcttaaggcaagcgccactgtggtcagcagatataagccctccggtatcattcctataatcgctgcaactgtcgatgtaacactctttgtgatagactcaccattcacaaaatgactctgccagaacaatataagcccaatcggaataataactatgccaacccatttgacaatcaaattgatggagcgtatcatctctgactgctccttgccgcccattgattttgcctcaaggctcagctttgagatatatgattcattaccgaccttttcaagccgtgcatagcactctcccgatacaacaaagcttcccgacatgagagtgctgccctctgtcttttctacctcatcagcttcacctgtgagcagtgattcatttacctgtatatttccggatatcacaaccgcatccgcacaaatctgctttcctgcggtaagcaaaatcacatcgtcctttacaagttcctccgtactaatctgctttacgctgccgtttctgatgacatccgcatgcggagcattcagtaaactcattttttcaagagtcttttttgcgcggatttcctgaacgattccgattaccgtatttccaataattataggcagaaatgtcagatttctgaaagaacctaccattatgagaagtatcgttatgacaagaaatataaggttaaaatatgtgaaaacgtttgaaatcacaatttcctttgtcgtcttgtctgtagatatatcagccctgttagtaagtccttcctccactctctgccttacctcttcatcggtaagtcccgtgatatttatgctgttgctgtctttgttcatctgattcatgctattcaccgttttccctcattattctatatcataataacgatacattttgaccctttaatcattataatggtacaacatcagcacgatttcaatacatatttcataaaaaaaagatgaactatttcttaaagttatcatttttaaactattaatccattactactcactttccgtctcagtactctcactgtctttagttgcaatcatatcatctatagaatccggaattgttccaaggattgtggtacttgaaagatatacatcatcatttaccttgatatagtactcaccaagcatagcgtttttctcctatttcttatacgcgtttacctgtaatctacttctttctcctcattgcccatacaacgattcctatgataataagcagtattggtacagctatcattattataagtcccgtaataaccgcctgcagcgtatttatagtgatattgcttaaggtgtaatccttcaccggtatcacacttgatgcaagctcaacatttccggtcattgatgtgataacatccttgaacatgtctgcattgttgccggaaacagcattatcatacgaatcatcaaccacataaggcgtaccaaacacaacaatcgatgcgccggtgcttgaatcatttacagcaagagctgtagtaaacggtccgttctcatctgagtcctctgctttcgatgtggtgatattcttccagtccttctttaaaactgcgctgtctgatgtagaaagcagctttgtatatgtcacatcatctgtatcctcaggataactgattgcacagcttcctgccaggaatacatatccgtctgttgcatctgaggtgtaatctgtcgtctcaaccgttggaagcaggtagagaggattctgataatattttgagctgtcattttcagctatcacaccggtcttgaagctgacattgtaagccgaaagtatcttgttaaagtttgtaagctcgtcattatatgcgtagcagccgacaatcagtgcctttccaccgccatttaaataatcaatcaccttctgtgcgtcttcctcgttgaaatcaacagtcggagaattaataataatggctgttgcatcctccggcaccttttcctcgttaaagagctctaagctcttaagatttgcatttgccttgcttacaacactctggaaattgcttcctatttccgtttcattgtgtccggttatctgataaattaccgggagctcatctgcatccattgtgacatactctatagcacttgtaatctgtccctctgcatcatagcctgtgatgctagactgcgactggtatccgtaataatatgatgagctgtcatattcatatatatcattataatcaatcacctttgaacggtttttgctctcgatgataaggctgtttgtggtaggtgtcgtgtctgtgtaatcctgataaaacttcgggcttgtcgccgggtctacatattttacctttatatgactcgaaagatccttgtatctgttgattgtctcatctatctttgcatcctttgatttcttggaattcaaaacatagattgtgatatcctcatcgagcttacttaccctgtcctttgtatcgcctgtgagcgagtacagctttgtagccgaacagtcaattgatgtgtacttggcaggaagcgctgtcagtacaagatttacaaccacacagattgcacacattacgacaatcattcctgctgaaaacgcccctgtgcctatcatcttctttgaaaatgcccatcttctcttctggatagactgcgtcgtaagaaagcataaaagcaaaataaccgtcacataataagctgccgatgtgacactaaagcagccactcacaaaattctcaaatggtgtatacaaatcaaagcaattaagcacctttgtgagcagattcccacttgacgagatgagtcctgtgatggactgcatcatgtatgagaggaataatgccgcaaatgtaagtattgcagatattatcacactctcagatatggacgatataaaaagtcccacggcgatgcatgataaaccgtaaagccagtagccaaacaaagccacatacgcttcactgagcgccaccttgccgtaaattgacaacacgagcggtgaaagtgcaaaaagcgctatgtctatggtgtatactgctgccatcgctaaatattttcctgctacaatccttccgacagatacaggcgatgtcagcataagctgatctgtctttgtctttttctcatcagaaagcgatctcatcgtgaggattggcactgcaatcatcataataaaacctattccatttaaatcatatgagatatacggataaccgtttttcagattgtatacataaaaatataggccatacactgcaagaagtgctgcaacaaacagccatcctataacgttttggaaatatgatttgaattctcttttaaatattgcaagcattatttctcatctccttcccctgtaagctcaaggaatacgtcctcgagtgacttcacaacagtatgcatctcaaggattggcatatgcattgcacttgcaagctcaaatatttcctcacgtatatcgcagtttgcttttgctataaccttagccttcactgttttctcttcctcagacttttcaaatgtgaccttatcaacatttactatcttctcaagcattcgtcttgcaccaatctcgtctgatttgaggacaaggttaatttcctggttctttgacatgagattaatcaggttctctgtggcatcacttgctacaagcttaccctttgatatgataaacacatgatcacacaccgcacttatctcacttaaaatatgtgagctcagtatcaccgtatgattttctccaagctttttaataagctcacgaatctctattatctgctttggatcaagtccaactgtaggctcatccagtatgatgatttccgggtagccaagcagtgcctgggcgaagcccactctttgtctgtagcccttggaaaggttctttatgagacggtttttcacctccgtgatgccggtcatgtccatggcatctgctatcatttcttttctctttttcctgtcgagctttttgagctctgctacaaatttgagatactcatataccgtcatatccacataaagcggtggtatctccggcaggtatccgatacatttttttgcctcctcaggctgtgcaaatatatcatagccgtttatctttactgttccaccatcagcaccaatatatccggtaacaatattcatggtggttgactttccggcgccgtttggtcccaaaagtccgtatatctttcccggctcaacagtcagcgaaagatgatctacggccatatggtcgccatatttctttacgagattactaatttctatcacagtaatgctccttcctaaattattatgacatcagagtataaaaaaagagtgttcaatttgtgaattctgaacactcttttgtacattatttataattttaatactatgatattttagctgtactaattgtctgcgcgcacaatcatagcttctctttcagcacctgttccgatgaacttaacaggtactccgatgtatttctctatgaagctgatgtatttctgtgcattctcaggaagctcctcgaaagtcttacagcttgcaatctcatctccccagccgccttttagctcctcatatacaggctttgcgttgtttaaaaccttgagatttgtggtaaagtcctctgttacctcaccgtttacatcgtagccggtgcagacttttattgtatcaaacttgccgattgtgtcgagatggtttacagaaagtgctgtaagtccgttaagacgcttagcatattttaaggtgacaaggtctaaccatccgcatcttctcggacggcctgttgtggtgccgtactcatgtccgagctcacggattttgtctcctgttgcgtcaagaagctctgtcacatatggtccctcacctacacggcttgagtatgccttgatgacaccatatacatttccgatatctgacgcagaaagacctgttcctgtaaggatgccaccgattgtaggatttgatgatgtaacatatggatatgaaccaaagtcgatgtcaaggagtgtagcctgtgctccctcaacaaccacctttttgtcatcctcaagtgccttgtgtaagagggtgattgtatcacatacatatggctcaagctgtgctgcatagtcactgtactctgcaaacatcttgtcgaaatcaagctcctttgtataatcagtctcaggatcatataccttaagaagtgcaagcttaagctctgtctgctccttaaggcgctccttgaaatcaggtgcgtataaatcctccattctgattccgcttctctcatacttatcgcagtatgaaggtccgataccctttcctgtagtaccgattttctttgcctgtctcaccttctcaagcgccacatcaagcttgctgtgatatgggaaaatgacatgcgttttgtcactgatttttaagtatttatctacatcatatccgtgctcctttaagttgttgatttcttctaaaagaacctgcggatttaaaactactccgtttccgatcactccgattgtatgtcctgataagagacctgacggaataaggtgcattgcatatttaacaccgtttgctttgattgtgtgaccggcattgtctccgcctgtgcatcttactgctacatcagcgtctgctgcaaggtaatcaattaccttaccttttccttcatcaccatagaaacatcctattactacatctacctttgacattttacatgcctcccttgtattttctgacacgacacattgtgccatgttactgcttgattttagtggtatatttattatgctttgtaactattaataattatttattacaatactctatcttcttagagcaagctattgcaagcgctccgggtcctatatggcatgagaccgaaagtgaaagcggattcatgactatctcgttatttggaaatgctgcttgaacctcttccttaaatgcctccgctgctgcaatatcatgcgtgtatgccatttcaagatttatctggctgccatccggattattgaagcgcttctcaaaatccgacttcatggcatctatcatgatgctctttgcctgctttacggtacgtgcctttgcaaatgcatcaagcttctcaccctgaatctgaagcaccggtttaagttttaaaagtgtgccaagagctgccgctgcaggcgtgattctaccaccctttttgaggtagttaagagtatctaccatgatatatatggaagactcaaactttgcatcctctaatatctgctttatctcagctgcattttttcctgcttctgccaggttcttcgcatctataaccgactggcgcattgtaactgatattctctgattattgactacctgcaccttgccgtcataatcctgcgagagcatatatgctgtctcacatgagcttgaaagacctgatgacattggaatgtatacaatctcatcattttcctttaaaaactcatcccatttatctgttacatcaccaaccaaaggcatagatgtcttgatatcgccacctgccgtaagcttctcatagaactgctcctgcgtcagatcgatattctcataatacatctgctcatcgatgtaaaaaggcattggaatcacctcaactccaagcttctttgcctcgtcaggtgtgataccgctgtttgaatcggtaactactataaccttactcattaattctcactccgatataaattttcattgtcgtattttttccaacaccgctcattataccataggtgtaattgtttgaaaagaagtttttgatggacagtggcgttattttacttacatcgtagacacggctggcttacaccagcctccgtatattcgcaatccgcacttaggtgcttcttgctcatatccggacattcgtcaaataaaaaatcagaggcaagcgagcttgcctctgattttttattttcctcattgtctacgattacatcatgcccattccggcgccggctccggctggcattgctggagtgtcctctttgattgtagctactgctgactctgttgtgaggagtgttgaagctactgatgttgcattctgtaatgcacttcttgtaacctttacaggatcaaggattccgttatcaaccatatctacatactcttctgtagctgcgttgaaacctgttcccggagctgattcctttaccttgttgatgattactgcaccttcaagtcctgcgtttgcagcgatatagtaaagtggagcctcgagtgctttaaggataacctttgcacctgtcttctcatctccctcaagtgtatcaacaaactctgcaaccttctttgatgcatggatatatgctgatccaccacctgcgatgattccctcttcaactgctgctcttgtagcgttaagggcatcctccatacgaagctttgcctctttcatctctgtctctgttgcagcacctacacggataactgctacaccgcctgccatcttggcaagacgctcctgtaatttttctttatcaaactcagatgttgtctcatcaatctgaccacggatctggcttactctgcctgcgatagcatccttgtctccggcaccgtcaacgatgactgtgttctccttctgaaccttaactgacttagcacggccaagcatatcgattgttgtatccttgagctcaagtccaagatctgagctgattacctgaccacctgtaaggattgcgatatcctcaagcattgcttttcttctgtcaccatatccaggagcctttacagctactacattaaatgtaccacgaagcttattaacgataagtgttgtaagagcctcgccctcaacatcctcagcgatgataagaagtcttgcaccggcctgaacaatcttctcaagtaatggaagaatatcctggatgttggaaatcttcttgtcagtaataaggatatacggatcatcaagtactgcttccatcttatccatatctgtgcacatatatgctgagaggtatcctctgtcgaactgcataccttctacaaggtcaagctctgtctgcattgtctttgactcttcaattgtgataacaccatcgtttgtaaccttttccatagcgtctgctacgagattaccaacttcctcatctcctgctgagatagctgcaaccttagcgatctgctctttgcccttaaccttctggctcatatccttaagtgcctcaacagctttgtctgtagccttcttcataccacgacgaagcacgattgggtttgctcctgcctcaaggttcttcattccttcctgaaccattgcctgtgtaagaactgtagctgttgttgttccgtctcctgctacatcatttgtctttgtggcaacttccttgacaagctgtgctcccatgttctcgaaagcatcctcaagctcaacctcttttgcgattgtaacaccatcgtttgtgatgagtggcgcaccgtatgatttgtcaagtactacgtttcttccttttggtccaagtgttactctgactgtatttgctaatttatctactccagctccaagtgctgctctggcttctgagccatatttaatttcctttgccatgatttatacgacctttctatttatatatttgatatttaattccaaaatgtaagcagctatgaccggatatgtaaaacgtaccggatctttagcttctatccgtaaattaatcttactctactactgcaagaatatcattctgtctaacgatgatgtactcttctccgtcaagcttaacctctgtgcctgcgtatttagaataaataaccttctgtccgactgttacctgcatcttaacttccttgccgtcaaccattccgccaggtcctactgcgataacctcagcctcctgtggcttctcctgtgctgaacttgtaaggatgattcccgattttgttgtttcctctgcttctaactgctttaatactactctgtctgataatggaactaatttcattgtattgcctccttttatctctgttagcactcatttctttcgagtgctaatttctttctgtaaataaaatatcactattgcatttcaatgtcaacagtgatatttcattttaatatttattttacattttctatatcaatccgtaatgctttaacgcatttttcactccatcatctgaaatatccgatgtgacatattccgcaatttctttaaccggtggcattgagttgcccatcgcgattccatgtcctacactctcaagcatttcaaggtcatttacactgtcgcctatcgcatatgtttcatcaagcgggatatccagatgattgcacagccatttgatgccggttgcctttgaggttcctttcggcacaaactccacgacattttccacatgctcaagtatcagaaaatcatcggcaaactctgccttcacacgctcataatcagtaccatctatcacgtcagcggagaatttattaattcttatttcgccgtcatatcctcttattatatgtgcatgctcaccaagtgactcaaaaaggtaatccacatacggatcatcctcaaagccctcgtcatctatccaatagtctgtggagccctcaagcactacaggcattttacactcagaaagcacccttatgaccttttgtaccatatctgcgctcaggtcattttcgtatattactttgccatccatttcaatatagttgccacatgccgcaattattccatcaaaacccatatttaatagcttctctgacctcacactggctctggcacgtcctgtacatataaatgccagatgtccgtttgccttgagggctgccacagcctctagggtgctttcaggaattaccatgtcatcgtcccatattgttccgtctatgtcaaaaaatactgttttactcatttgctgctcctaatatctttattatcatgtcaaacactgctatcttaacatcttataaatcaaatttcaatcagtttatccacagtaccaatacctctagaaagcaataattttgtatgtcaaaaatcccggtgcaatgcactgggattttgctataaaatgtatgaaataaaatttattaagaagaattgctataataatttgttactgtactgagagatatgaatatcccatgagactctcatcaacctctctggcagcctcacgtccctctctgatagcccatactacaagggactgtccacggtggttatcacctgccacgtatacgttttttacgtttgtagcgtaatgtccctcctgtgtacttacgtttgttctggcattgagctctacaccaaatgcctttgccacatagctttctgttccaaggaagcctgctgctataagcacaagctctgccggaagctttttctctgatccctctaccggaaccatcatgaacctgcctgtcttctcgtcctttttactctcaagacttacaattgtaagctcctttaggttgccgtttttgtccttgtggaactcttttacggttgtcttatagatacgtggatcatgtccgaatactgcaatggcttcctcctggccgtagtctgtctttaagacctttggccactctggccacggattgtttgcggcacgctctgtaggcggacaaggcatcatctcaagctgtgtgactgatttggcgccctgacggattgcagttccgacacagtcgtttcctgtgtcaccgccaccgataatgaccacatttttgccctttgcagatacaaacttgccatctgtcaggtttgaatttaaaaggctctttgtattctgggtaaggtaatcaacagcaaagtaaataccctttgcatctcttccgtctgcctttatgtctcttggatttttggcaccacagcaaaggattaccctgtcatacttcttgtaaagctctgccggctttatatcctttccgacatcacagcctgtgacaaaatgaatgccctcttccttcattatattaacttttctgtcaataatgctcttatcgagcttcatatttggaataccatacatgagcaggccaccgacgcggtcctctctctcatatactgtaacatcatggcctctctggttaagctggtctgctgccgcaagtcctgaaggacccgaaccaatgattgccaccttcttgccggttctgacctttggtggctttggagctgcatatccgtttgcatatgcagtctctattataccatgctcattgtccctgactgacaccggactgccccagtgtccgcatgtacatgccttctcgcacagtgccgggcagactcttgatgtaaactcagggaaattattggtcttgtgcagacgattatatgcctgctcccagttgccggtgtatacaaggtcgttccactccggaaccaggttgtgcagaggacagcctgatgtcatgcctgctattgtcattcccgactggcagaaaggaactccgcagtccatacaacgggcagcctgtttctgttgattttcttttgaaaggaacacatggaactcgttaaagttcttaatacgctcctttggctctacagacgctgcttcgcatctgtcatattccataaatcctgttggttttcccattatctgcgtcctccttagcctcttgtgctggcataaaatgcctcaatctgtgcctgctctgcgttaagacccttttcttccatctgtacaatagccatctgcatacggttgtaatcgtaaggaataaccttcttgaacttaggaagatactcactgaaatgatcaaggatttccttacccttttctgagtttgtaagtgttacatgctcttttatcatttccttaagctctaatacatcgtacttgtttgagacctcctcagtaaataccatctgcttgttggttctcatgtaaaggtcattgtcctcatcaagcacatatgctattccaccgctcatacctgctgcaaagttttttccggtctttccaaggataactacgcggccacctgtcatgtactcgcagccatgatcgccgacaccctcaactactgctgttgcaccggaatttcttacgcagaaacgctcaccggcaacaccgtttatgaaggccttaccgctggtagctccgtaaagtgccacgtttccgatgatgatattatcatccttctcaaactttactcctgcaggtggatatacgatgagctttccacctgaaagaccctttccgaagtaatcatttgaatctccgacaagctcaagtgtaagtcccttagggataaatgctccaaagctctgtccgcctgcaccgttacacttgataacaaatgtgtcttcatccagcgtatcgtcatatttctttgtaatctcagaaccaaatattgttccgagagatctgtttgtatttgttacctcaatctcaatcgcgcgcttttgtccgctctcaagtgcgctcttaagctgtgtcatgatctcagtcatatcctttgtctttgaaagctcaaagtcatatacctgcttaggatcgaatataacactctgctttttgccgtcaaacggattattaagtatgcagtcaaggtcaatctttgactgtctctcgcttagattatcacgcttctttaagagatctccacgtccaacgagctcatccactgtctttacgccaagctttgccatatactcacgaagctcttcagcgatgaaacgcatgaagttctcaacgtactccggctttcctgcaaagcgcttacgaagctcagggttttgtgtagcaattcctgccggacatgtatccaagttacatactctcatcattacgcagcccattgttacaagcggagctgtcgcaaaaccgaattcctcggctccaagacacgctgctattgccacatcacggccactcatcagcttaccgtctgtctcaattcttactttatttctaagaccattcataagaagagtctggtgtgtctctgcaagtccaagctcccatggaagtcccgcattgtggattgagctgctaggtgcggctcctgttcctccgtcgtagcctgagataagcactacctgtgctccggcctttgcaacgcctgccgcaacagttcctacaccggcctcagaaacgagcttgactgagattcttgcatctctgtttgcattctttaagtcgaatataagctgctccaaatcctcgatagaataaatatcgtggtgtggtggtggagagatgagtgcaacacccggtgttgaaagtcttgtctttgcaatccaaggataaaccttctttccaggtaagtgtccaccctcgcccggcttagcgccctgtgccatcttaatctgaatctcctgtgcgcttgttaagtatctgcttgtgacaccaaaacgtcctgaagcaacctgcttgattgctgaacagcggttctttccgtcttttccgattgtgagacgatccttgtcctctccaccctcgccggtatttgattttccgtgcagatggttcatggcaattgcaagtgtctcatgtgcttccttcgaaatagatccgtatgacatagcacctgtcttgaaacgtgtcacaattgagtcaacgctctcaacctcctcgagcttgacacccttcttaggatagttgaaatccataagtccacggatatttgtatttttctcttcctcatccacaagtgctgtgtactgcttgaacagattgtagtcaccgcgctgtgtcgactgctggagaagatggattgtagccggattgtacagatggtcatcagctccgcttctcatcttgtgtcttcccttgctgtcaagtgtaacatctgtctcaagtccgagcggatcgtaggccgcagagtgaagctcattcacatcgttctcgatatcctgtaatgtaattccaccgatacggcttactgtatttgtgaaatacttatcaataacactcttgtcaataccgattgcctcaaaaatctttgagccctgatatgactggatggttgaaatacccatctttgctgcaatttttacaatacctgtgatgattgcatggttgtaatcatcgattgctgcataataatccttgtcaagcatatgctcgtcaacaagctgcttaactgtatcctgtgccagataagggttgattgcacttgcaccaaagccaagcagtgtagcaaaatgatgaacctctctcggctctcctgactcaagaatgagagaaagagatgttctcttttttgtctttacaagatactgctgcaatgcagcaactgcaagcagtgaaggaattgcaacgtggttctcatcaacacccctgtctgaaaggataataatgttggctccgtccctgtatgcacggtcagcctctatataaagtctgtctacagctttctcaagacttgtgttcttgtaatatataataggtaaaacctctaccttaaagccatcggcctttaaattcttaatcttcataaggtcggtgtttgtaaggattggattgttaatcttaagtacacggcagttttccggcttctcctcaagcacgtttccggcctcaccgatatagagtgtggttgatgtgacaacctcctcacggattgaatcgataggcgggtttgttacctgtgcgaagcgctgcttaaagtagttgaataacggctccctgttaccggataaagctgcaagcggtgtatcagtacccatggccgctgtgccctcaacaccatttttagccatcggaaggattgaatccttgagtgactcatatgtgtaaccgaaggctctctgcattctctggcgctcttccttcgtatactcaggtactctctggttaggaatctttaaatccttaagatttaccatgtatctgtcaatccactcaccataaggctgcttgtctgcatatctctccttgagctcatcatcatctatgatttttcctgcaacagtatccacaaggagcatctttcccggacggagacgatcctttttcacaatctttgtagggtcaatctcaagcactccgacctcagaggaaaggataaggtaatcatcatctgtcacatagtaacgtgatggacgaagtccgtttctgtcaagcactgctccgactaaatcaccatctgagaatacgattgaagccgggccatcccatggctccatcattgtagcgtaatactggtagaaatccttcttcttctgagtcatgattgaattgtttgcccatggctcaggaatcattatcataacggcaagtggaagctccataccactcattaccaagaattcaagcgcattatcaagcatagctgagtcagatcctgccgcattgataaccggcaaaaccttctggaactcttttttaagcttaggagactccatgttctcctcacgggctgacatcttgtcagagtttccaagaatagtgttaatctcaccattgtgcacgataaatctgtttggatgagatctctcccagcttgggtttgtatttgtagagaatcttgaatgtactgtggcgattgctgactcataatcaggatcctgtaaatccatgaagaactgtctgagctgctctacaaggaacattcccttatatactattgttctgcttgagaaggaaaccacatatgtattgtcgtttgactgctcgaaaacacgtcttgcaacatacagctttctgtcaaactcaagtcctctctcaacatcctcaggtctttttacaaagcactgcatgatgcatggcatacagtctctggcttttttagaaagcttatcaggctctgtaggcacttctctccatccgaggaactcaagcccctccttctccacgataacctcaagcatcttctttgcctgaatagtcttgaactcatcattagggaagaaaaacattcccacaccgtaatctctttcgtctccaagatctattccaagtggctttgtaaccttcttaaaaaacttatgagaaatctgaagcaggatgccgacaccgtctcccgtcttaccgtcagcgtcttttccggctctgtgctttaagttctcaacaatctttaaagcattctcgactgtctcatgtgttttgatacctttgatatttactactgcaccaattccacagttatcatgctcatagcgaggatcatataatcccttagctgtggctgtgctttcattccattgtttactcataggttcttcctttcctagtgtaaatttgttaacggataacttattaagaagtgaatcatttcctgtttatgattttacaactatgaaagctcaatgtaaacagtttttttcttgctattgtctgattatttgataacttaatattataaagttatttttctgactatggatgtatttttatcttttttataagggtatacgcacaatttactttttaaaattccaaaacttttttcaataaagcaatgcataaaacactgtttcagcaaattgtgtctgaattgtgtgtactttacagtaacttttcttggctgatatcataaaaaaatcagctatactttttattgtatagctgatttttataaacatccggtaactatcctaaatcgcattgctcatatttgtaaaactgcacgatactcgtattttgtctacactccgtttcggtccatgctaaacagttccttctgtgtgcttcgcataataataaaatatcacagcaccaacaccaaggcacatgacagataccacccatgccattacactgccatcaacagtccacttcaaaataccggtctctgtccttataacagcaaacgcatttgcggtaatatgcccaatcatggccgcatacacatgccctgacttatacataaaagctgcaagcacaaggccaagtaaaaacgcataaacaaactgcactatattaaaatgaatgagcccaaacaaaagcgccgacaaaaatacagcctgtggcacattcattattttgcgcatatttccaaatacgatgcctctgaaaacgagctcctccataatcggagaaagaattgccgagccaatcagctcaattacaagagtgcttgcataaaagctctcattcgccctggcatatccttctgagagcccgataagcggtgacatggtgatgatattattgagcgcaaatgaaatgaacagtgtaatcacaatcacccatagcacatttataaaaagtgctctgtctatctttggttttttaacaaacatctgttgtgtcggcttatagcttgcaaaatacataaatggtattgtaattgctgcagatattatctgcgctatcatgtatgtcgaagctgtgtgtccgatgaacgcaaaaataaagtacattgcgctcagaaaaacaatgtagtaaagcacaatcgggacaattatctcccacactatcgctcttaattttaaattcttattcatgaaatcccattcctatctactgtttataacctcaggtctcaatgcattgcattttcataaaagctaatcgaaaagcctggaaagtacatcaggaagctgccttatatcatctatcacagcttttgcaccggcactcaccatctcgttaacatctccaaatccaaagcttaccgctatgcttggcacattgacacgatttgctccctcgatatcaaacatagtatctccgattaaacacatctcatcccttggaatgtctgaccaccggcgcattacctcgttaagtacttcttcctttgtatctatcctgccgtcaaatgtagctccgaccacctcatcaaacatatccagtattccaaaatgctccaaaatacgctcacacgatttttccggctttgatgatgcaagccctatcctatagccggctgctttaagcgcctctatgcattcccttacccctggaaaaagcgaacattcaaatatacctattttgttatagcgttctctgtacttttcgaccgcttcaagtgctctctctttagtaaatccataatgctccataaatgtgtttatgagtggcggtcctataaagaaaaacagactgtttctgtccggctcagatatgccaaagtgtgaaagtgcatattgtgccgactttgtgatgccctctgatgagtcaatcagcgttccgtccaaatcaaataatattgctttcatttgttatctccattgctttaaatttattgtacttttaattaaaatgctaggtcagtatctcatttaacactcgtccgacagcatcggcaaactcgttgatactctttatcttcacaagacttctgccgaatatctttgttgcaagctcactgtcatgtgcacttcccatgaagatgccaattacgtctattccatggtttttaagcctctgcacctcatttacggtatccttaacagcaagagcatcagtgtactccctgtccttataaaaggctccctcccccgctatctgatcatcctggggacttgcatccgaaaacatgaaaagcaacttctttggctttggacttagctccatcagatgtgatgccgcgcgcagagcaaggccatccctgttatttcctgccgcaacaaaatgaaataattcatcctccacaccataatcgtcatattccttaaagatgtgcatcaccgtgtagcctcttatgctgcagtatgagtaaatctgcaccggtatgccacaatttgtcaggctctttgacagtacatatgcctgtgctgctatcttctgctgcatctgttttctggaagaagacgcatccatcagtatgtcgacagaaaagcccggcgtctccacctcatcttttcgctcaaaaacacgcggattgtccaagtacagggccttccatactctcgaaggctttatcctgccgtgtgtggaagcatccataaatgtctcatctgctgtctccaggtgcattctaaggctttctgtaagtctccttatactgttttgatacactgccatgtttttttcaaaatgctctttattcttgtcgtattgcatggctgtctcttttgtaaatgcaagaatttccctgcgttctcttttgttgtcaatctcatcaggtacagtctgctttttctccgatgaaatacctctggtaaaaagcaaatgacagtttttgtgatttcctacacagagctttttctccatctcggcctgctgcctgtcagaatacatgctttttccaaagcaggctgtcacataccgcttcgcttctattggatctttctgcagtgcaaactgcagcagatatctctttgaatgctccatagacaaagctgctgtgtccgaggccatatttttatcataaaagctattcgctctgacatactgtgtgctgacttttcctattgagtgaaatgctcctgctaccttctgtaaaaaatatatgccctgcggctttgccacctttatcggcttatacgagaaatacttccacagattttctctcgttttttctataatctcatccgttgtcatatcaggtgtaaaacaaaaagcatgcagtatctcttcatcctctttgcaaagatctgagggttttccaagtatccttctgcaatgtgcatttctgattatatcaatcatcgaatactccctgtttttatcgactcctgcaaggctctttttcgcgtactcaagccttaaatcatataaggcaggtctcgtttgtctctccttttcatacagggcattttccaaacctatccataaaagaccctcataaagcatggcgtttttccctgtcagctgattgaataaggcatctatcttgtcatgctcataccacttgtattcaagcccaataatcaaattcagataaatatcagcggatccatcaggtgcaaatgccagaaaaagcggctctatgtcataatcacaggccgccatccatatgaagtttcttgctctttttgcttcctttatatcctgttcttccatattttccattccttcatatgtcacaagcttatatcaacaaaacagctgctctctgctcatcttccttgagattcttgcacggattgtatcacggataagcgtctgctcatattcatcaaagctcttgtttgttatacccatatccagagctgtatatatatttaagcccttttccatcataccaattgaaccgatgagaccacgcagatcaagtgcctttgaggatatttcgccatttttgcacttggtatgcagttcaagaaatacctccgcaagctcatttgctcccgcttcacgtattgcaggataatgctcctttatgagcttcacaaggctctcttttgaaatcataggcatccggattaccgcaaaacgtgatacaagagcctcatttagctcctttgtgcctgcatagccgtaattcatcgtggcaataaatcttgttgccggatgaagcgacagtctatcatagcccggcacatctattgtacgtctgaaatcaagtgtggcatgaagcactgccatagcctcactttttgccatatttatctcgtcaagcaccgcaaagccgcctgtttttgcggctgtatacacaggtcccggcctgaaggttacttctccggcgctaaacgtatcggttccgataagtgatgctgcatccatatttacgtgaaatgacacatcccagcgtggtctgttaaatacacctgccagattctctgcgaaaagattctttcctgtggccttttctcctactaaaagcagattttctccacacaaaacagctgttatagcctgttcccacacatcgcttccgtaataaaactgtgtaggcacggggattcttgactcatactccttgtccaccggatactgcgagcgaaacttttcaatttccttaatcagattttctgaaatgccaagctctcttaatttgtccaacaagctcatcgcttcctttcatgtcagatattttaactgttctaaggccatacatactcaaaaccgtacacagtttatgctttacgttatattgtcatacgatatattatttcttcacgcccttggtgtcacggtttgcaatgtgcagcctgtgaagcgccacctgcttaccctttacctcgacctctttttccccctggtcattaagcagataaatgtcagtaagctcatcctctctgtcaagcctcattcccctgacacctactgctgcctttttcttttcaggaatagtgccacagtcgattcgaaggaacatctccttctttgaacgcattaccattgtagcattctctgaaagcatgtcaacaaataacagctcatcatcatccatgagctttgtagcctgcgaggtctttcgtgtcaccacaaactcagcaccatccacgagctttatcatggctgacttcgttccaaatataagcttgtgcttttcaacatccataagaggtgctataaatactatatcctccttactgctgtcatagttgcttacattgtcaataggtgtgcccttgtcacggaatttgccgtaaggcaggtctaataccttgacaagatgcatgtttccgttgtttgtgaaaatgcacagcttatctatatttttgacctttaatatcagcttgttctctgcgtcagctgtatctttgtttctatcataggttgaagtatctactgtcttcacatagccgaagcggtccataagcagcactacatccgatacctcaagctcttttttgaccacaacagcttcctcgagattgtcaagctccgtgcgtctgtcccttgcatactccttgcggaacgctttaagctccttcataatgacctttgccatggatgagcgatgctctaaaatatcgctgtactctgcaatctttgccctggtctcctcgtgctccttaatcagagcctcaatttcgagtccaatcagcttgtacaggcgcatttcaaggatagcagctgcctgacgctcagtaaagcaaagctgggctgccatggcttctgaagcctttgacttgaatttaatcccctctgtctctccgtttatgagacatgcctttgccattttctggtcacggcttcctcttaatatttcaataatcagatctatcacgttgcaggcctttataagtccctgctgtatttcttctttctcctgctcctttgcaagaagtgtctcatactttctttttgcaatctcatactggaaattgacatgatgccttatgatgggtacaagaccaagcgtctcaggtcttccatttgcgacggccagcatatttacaccaaaagtgtcctccagctttgtctttttatacaaaaggttcttaagtgcctcaacatcagcaccttttttaagctctaagacaattcttattccctctttcgatgactggttggttatatccacaatatccgttgtcgcttttgactcgacaagtgaatagacatcatttaagaattttcctatattggcaccaatcattgtgtatggaatttccgtaatgacaagcttgtcctttcctgccttgcccttctctatttcgattcttccacggatttttatctttccctgtccggtctcatatattgctgcaagatcatcctgatttgcaacaatgcctcctgtcggaaaatcaggtccctttatatactgcatcatctcggctgtggtgatatcaggatttttcatataagcaatcacaccgtccaccacctcgccaaaattgtgtggcggaatgcttgtagccataccgactgctataccctcagctccatttatcaaaaggttcggcaccttgaccggaagcacctctggctctttttctgtctcgtcgtagtttggaatgaaatcaaccacatttttgtcaagatcagcaagatatgcttcctgtgtgattttttgaagtcttgcctcagtataacgcatggcagcggctccgtctccctcgattgagccaaaattaccgtgtccatcgataagcggcatgccctttttgaagtcctgtgccaaaacaaccatcgcatcatagattgatgaatcaccgtgtggatgatatttacccattgtatcaccgactatacgcgcactctttctatatggcttgtcgtacctgatgcccagctcatgcatatcataaagtgtacgcctttgtacaggcttaagcccatcgcgcacatccggcagggctcttgctataatgacactcatcgcatagtcaatatatgatttctgcatcagctccgaatattcggtctgaattatattgttgtctacattgttatctatatttctatccatgtctttctccgattataaatactgcttaactattcagaaccactgagaaccaaaagctgctgcgtcatgcttatacatcaagctccgcgtcatgcgcatgctcgtatatgaactcttttctcggtggcacatcactacccataagcagtgatgtcacatcatttgccaggcgtccatcctctatttcaatacgctttagcatccttgttgcgggatttagtgtggtatcccagagctgatccgcatccatctctccaagacccttatatctttgcaacgtaaacttgcctgtatgtgtctttctgtacttgtcaagctccgcatcgtcatacaaatatttttcctcgccctttgacggaatagccttgtaaagcggaggcatggcaacatatacatgtccctctaaaataagctcaggcataaacctgaagaacagagtcaaaagcagtgtggagatatgagctccgtccacatcggcatcggccataatgatgattttgtcatagcgaagctttgttatatcaaaatcatttccatacccttccgaaaatccgcagccaaacgcatttatcattgtctttatttcagcgtttgccagtaccttatcaatacttgccttttcaacattcaaaatcttgcctcgaatcggcataattgcctgaaacatacggtttcttgccatctttgccgagcctccggccgaatctccctcgactatgaaaatctcgcacttagaagcatccctgctctcacagtttgcaagctttccgtttgaatcaaaggaaaacttctgctttgtgagcagattggtctttgccttctcctcagcttttctaatctttgcggccttctcagcacatgatattaccgtctttaagacctcaagattcttgtcaaaataaagcggtacctcgtcattcgtcaccttggcagttgcacggtttgcatcctgattgtcaagctttgtctttgtctgaccctcaaatctagggtcaggatgctttactgacactacagcagtcatgccgtttctgacatctgctccgttgaaattcgcatccttgtcctttaatataccaagctctctggcatatgaattgataatacctgtaaacgcagtcttaaagcctgtgatatgcgctccaccctcagaattgtatatattgttgcaaaaacctagaatattctcatggaactcgcttgtatactgaaaagccacctcaacctttatatcctcactctctcctgtaaagtaaatgacatcatgcagcttttcaatatttttatccaaatcctttacaaaaccaacaataccctcaggctcatgatactcaatatgctctgtcgcatcacctcgtttgtcctcgtatatgattgtaagcttcggattgagatatgcagtctccttcagtctgttctttacatcctcttccttgaatcttgtcttctcaaaaatctccggatccggcaggaaattaatctttgttcctgtttttttggttttgcctaaagtaggaagcaggccattttcaagctccacgacaggaacacccttttcatatctgtcatggtggatatagccatctctgcttatctccacatccatatatgtggataatgcatttacaaccgacgaaccaactccgtgcagacctccactggtcttatatacagaattgtcgaatttacctcctgcgtgcagtgtcgagaatacaacacgcgccgcagatacacccttagcatgcatacctacaggtattccacgtccgttatcctcaaccgtacacgaaccgtttttctcaagagttacccttatggtatcacaggcacctgccagatgctcatctacggagttgtccacaatctcatatatcagatggtttagtcccttggttgtgacacttcctatatacatacccggtctttttctgactgcctcaagtccttctaaaattgctatgctcttctcatcgtatgtttgcttcttggccatacttgtctcctacttctttaaattgcgtaataattatattatctgccctgcctgctatccttgatatgcgctaacaccatcgttgctattttaaatatcatagcatcatcaaaggttctgatatcaagtcctatcgacttctcaatacgctctagcctgtacacaagcgtatttctatgcacataaagctgtcttgcagtctctgaaatgttcagattgttctcgaagaacttggagattgtagacattgcctcctcgtcatcaagtatctgtggcacctcatcaccaaaaacctcacggataaacatctcacacagactcattggaagctgataaataagtcttcctatgcccagcctgtcatatgccataatttccttttccacgtaaaacagcctgccgacctcaagcgccatttttgcctcctgataagactctgcaatctttggaagaacatccgtcggattgccatagcccacccgtaccttaatcatagcctctgcaagcagattgtcaaccagacttcctgcaatagatgaaagcttttcctgaaactttggtgaatctatatcctcaacatcctttaccagcactacattatgctcatccatcgccaccacaaaatcaccgcttctgatatctgccagattctttacaagctcaactgctatctcattgctgttctttccggtatctataacatatactactcgttttctgttttctatatgtaatttcttggcacggtttattatatcagaaccaagcatattgccaagaagaatattctgaataaaattatttctgtcatatcgctctgactcaccgagcacaagtgtacgaagctgacaaactgccatcctgcctattacaagattctcactcgtatacgggcagaacattacgagcacatactcaagctctgaatcaatttcaaccgcaaatgcgattgcatcgtttttttccctaacatcatcttcggatactataaactccttcacaaaaatgtcgctatgttccggctcttccaccgtacctgtcagatgctttcccttggctgagtataaaatcgcatcaaacgaagtaatattttttatttcctcaagtgattttttcagtttctgattcgtaatcatattcttatcctctcattactgttctgacgcaggcaagtaaaaagcttccacaagtcataagctgtaacccggttataatttaacaccgtaacttaacttttcagaacatcacacacattcgcaaaagaaaaccgggtgtaaattatacacccggtctgtcaatttacaactatttaattttaacgaactagttggtaattgtcaattcagtttctttatcaaatacatgaatcttgtgtggatcaaatgcaagctcaatgtgatcaccgtaacgagccggtgtatctgaatcaactcttgctgacatatttgcgcctgcaactgtgaagtataataatacctctgcaccaagtaactcatatcctgtaacatctgaatcaatcttgcatgaagcaaatttatcaagatgctctgctgaatcgtagatatcctccggtctgataccgaatactacgttctttccagcataaccgccatcgataagcttcttagcctttgcctctggaagctcaacctgatatttatcgaatttaaggaatgcctttgctccctcaacaacacactgagcatctacaaagttcatctgtggtgatccgatgaatcctgcaacgaacaggttgtttggctgattgtaaagcttctgtgggctgtctacctgcatgataacaccatctttaagaacaacgattcttgttccaagtgtcatagcctctgtctgatcatgtgtaacgtagatgattgttgcacctaatctgttatgtaatgaagaaatctcagatctcatctgtacacgaagctttgcatcaaggtttgataaaggctcatccataaggaataccttaggattacgaacgattgcacgacccatggcaactcgctgtctctgtccacctgaaagagcctttggcttacggtctaataatttctcaaggtcaaggattcttgctgcctcctcaacttttgccttaatctcatcctttggaacttttctaagcttaagtccaaatgccatgttgtcaaatactgtcatatgtgggtaaagagcgtagttctggaataccattgcgatatcacgatcctttggctctacgtcattcataacctttccgtcgatgataagctctcctgaagaaatctcctcaagacctgcgatcatacgaagtgttgttgattttccacatcctgaaggtcctacgaagatgatgaactctttatcttctacttcaaggttgaaatccttaactgcctcaaatccgtttggataaactttgcaaacgttctttaatgataaacttgccattttaaaaatacctcctaagtattatgtacatatatgtaactgttcagtgccttgactgtctgttaccttgtttctttgtatctttataatacaaaacatatcgtcaattggctatagtcaatccgccaaataatttaacgtgttgttgtcattatgacgaaacacagtctgatatcgaaacaattacaaggtaattactgcaataaacgtactaattacagcttagaatatccaaagccattgaccatagcctcaatcggcagccccttcttgcagaatggacactctgtaacaggatatgtctggtagtttaccacatcatcgtcatcaaacagcttatcaatctttactccattgacctcatcgatggttgagaatatggacgcaatacatgtgaccataccgccataatagttgatacactccatcgctcttctgatcgtctcacctgtcgtggtagttgccagaagaagtacaacatgcttgccatctatagcgcccttattgttatccctgaaaagcatctgtccgttgttaatctcaggcgatacaacgtaaattgtctcgtgcttattcacagacataagtccgtttcgctcaatctcctggcttaagaatgcaccaatcatttctgttccatccatacatactattgtatctatatatgaatgatgcggtaccttggtgtaaagagcctttgcagcttcctttgcctcggacacacgggtcttgatgcttgtcacatctacataataattaatatgcgaatgacttgtagcgaaatgtcccggtatagcgtgtaagtttaagcctgcactctcctttgatttaaattttacaatacgattttccatgataagtccccctttttaagtaaagattagttttaattgtaactcatttgtgattaattagctcctgtagaaccgaatccaccggcaccacgcttcgtatcagaaagctctgacacctcattaaactcaacagccagatatggcatgaccacaagctgcgctatgcgatctccgggattaatagtgcgtgcctgcgttccatcattgtgaagagccacaatatactctcccctgtaatcactgtcacacacacccacgcagtttgccgggcgaagtgcctgctttgcagctaagccacttctggcaaaaactgccccaaaatatccgtcaggaatctctatcgaaagccccgtgcctatctttgctgtctcgtgtggctcaatgacaagatccttagtaatgtcggcatataaatcatagcctgctgcatattcacttccccttgtagggattttggctgtggttgtcaatttttttatatttattttcattttataatttcccctgatgtaattttatatatgaccgtctatagccatttattacccaacctgttaactaattatttccactccagacttgagtgctcaatcttcctgtcacgaagcataagctctgagacagcctcctttgccggcttatcctcaaaaagcactctgtttacttcctcgataatcggcatccttacatcatatttttctgcaagggcaagtgcagcctttgctgaatagatgccctctacaaccatcttgacttcttttgttgcttcatccattgtgtagccctgacctatgagcattccggcctttctattacggctgtgacgactctcacatgtaacaataaggtctccgatacctgtcagtccaaaaagtgtctccgcctttgctcccatctcaatcgcaagcacagatatttctgcaattcctctggtaataagcgctgcctttgtattatctccatagccaagtccgtctgccatgcctgctgcaagtgctatgacattcttgagggagcctccaagctccattccaagcacatcaggactggtatacacacgaaatacctcattcataaaaagatcctgtactatctcagcggtcttctgtgtccttgctcctgcaacaacagtcgtaggaagcagccgtccgacctcctctgcatgtgaaggtccacacattacagccacatcagcgcaaggtatctcactctctaccacatcagatatggtcataagagtgttttcttcaattccctttgccacacagacaattatctgtccttccttcacaaacggagccatttttactgctgtgcttctggtgaatacagaaggtaccgcaagtacaagtatatcgttatttttgattgtttcctctatatctgttgtaaaggtaatgctatccggaagctttactccaggaagcttatcaatatgctcatgcttttctttaagcatctcaatctcgctctccacgattgaccatatttcaacagaatgtccgttatttgcaagcaccagggataatgctgtaccccagcttcctgcacctataatacctactctactcattttctatgcctcgtattttatataattattataatcaaaaactattatttactttgccttctgaccaaatttattttcagttccgcttaaaagtctcttgatattggctctgtgtcgccagatagccatcgccgtaaaacaagcagcaagtatatcaaactcaaccgcataattgccacttactccaagcagccccatatggttaaacacaattgcctgaatcagaaacgatataacaaccagtatagaaccaagcgagacatatcttgttatggctacagcaagaataaacaataccagacatatcggagccgcaatcggacatacagcaagtatcacacctgatgtacatgctattccctttcctcccttgaaattgagaaagaatggaaaattgtgtccaagcaccgctccaaagcctgcatacagctctatgcatttaacagcctgtggatatgtatttctatatatgaaataaaatatcaaaaccgctatgattgccttgaacaaatcaccaaagaaggtaactgcaccggccttccatccaagtgtccgaagcgtattggtggtgcctgaattaccgcttccatgctctcttacatctattccatgtgccttaccataaaaatatccggtctgaaaggttccaaagaaataccctacgaccaatgctaaaatcctagccagtatcattttactcattttcctttcgttctcttgtaataaacttaagtgcagttcccctgaaaccaaatgtatccctgattctgttctcgagatatctggtatatgagaaatgcataagattcttgtcgtttacaaagattacaaaggtaggcggcttaaccgaaacctgagtcacatagtatatcttaagtctcttgcccttgtctgtaggcggctgctgcatggcaactgcctccgtaacgatctcatttagcactcctgttgcaacacgcattgagttattttctataacaacatcgatgagctcaaatatcttgttgagtctctgacctgattttgccgaaataaacagtatctctgcatatggtataaaacttaatatctgtcggattttctctgtgtgctgctttacggtattattatccttttcaatggcatcccatttattgacagcaatgataattcccttgcctctttcgtgtgcaatacccgcaattttagcatcctgctcagtaactccctctgtagcatctatcactacaatgacaacatcagctctctcaactgcggaaactgcacgtataatactgtatcgctctatatcctcttttatcttattcttgcgcctgagaccggctgtatcgataaatatatactccttaccatcatattttatggctgtatcgatagcatctcttgtggtgcctgctatatctgacactattaccctgtcctcacgggcaagcttgttgataagcgatgacttacctacattaggcttacctactatagcaactctcggtctgtcatcctcatcgtcctgcttagatgaatccggaaaatgctttacaacctcatcaagcatatctccgagtccgagcatcgaagctgcagatataggatgtggatcaccaattcctaagttataaaactcatacacatccgtcatatacttttcaaagctgtccaccttattgacaactaatacaaccggcttgtgtgaacgacgaagcatatccgccacctttgaatcagaatcaacaagtccctgcttcacatctgtaataaaaataataacatctgcggtgtctatagcaatctgtgcctgctctctcatctgtgacagtatcacgtctccggattccggctcaataccacctgtatcaatcatggtaaaattataatcaagccatgatacatctgcatagattctgtctcttgtgacacccggagtgtcctttactatagatatcctctctcctgcaagcgcattgaagagagtagattttccaacatttggacggccaacgatggccactactggtctgctcatatactctcctgttctaaattcatattagattatagactaattgtaactattcagaataatgataaaataataaacaaaacatctataacagagtaattatatcacaataccatttacagagacaactattcatatgtcaaaagtggttcttttgatgaaattaatccattttctttaagaacagctatcagattagtacagttttcgccaaaactaatgttgaccgaatacgtttcaataccatcggaacgggcatccccaaaatcagaatactcctttgttacccccagtatatccaacagctcctcataccatgtgaagccatcgacattccagctttttccaatcctgttgccctttggcactgtaaaattcagcataagattgtacatatagctggtatccttatccactccgtcaagcattctctgcaaattatattcctgcatcacaccggcctcaacatccttctttacagcatcaaaaatatccgcagcaacttttccgttaaagcgctcattcagcacatctacatatttatcattatactgctctgccgagccattgataaaagtaatatctgtcgtatcacactgcattatggcattaataatattctgtggtttattttcctccgccataatcgccttacactgcttatgtggattaaaatcatccgttgtatgatatacacggttgaccttttctccattttttaatgtatatgagattgtaatatacccggaatcatcatatctctttttaaaataatcctttttctgcgccataagtatcttttgagtctctaaaatcttttcaacgtcctttccctccagattgatatcaaaatctatggctatacgggcagaatcaatatccgaaagcttcggtatataattttcctgcacatttccgtaaactgttatacctccaaatacaactacaacaaaagcaccaaaagcaatgatttccttaaatagtgctttagaaaaaattttaaaattcttccttataatcatctctaaaagtaagaaggctatgattccaagcaccactgccagcatcataattgcaggaacaccaatgctgattctaagttcaagcaaaagcgacgctgcaacaatagataaaatcaatcctcccaaactgccaagcccccatctgaaaaccggcttaagctttggaatagctataaaacttcctgcattttccaaatctctatgcttataaatcttataagaaataaagtatataactgcagccgcgatgacatagactacgatagtatttgtgcctctgaaggtatatttaatgcagtaataatcatcccctgcattcttcatggtcggatgaaagcctacccgattgagaagctgtagcatgggtgcaaaccacgtagcacttattttccttacaaattccatatatgaaagcccgtacgatacatatgtgagcacattggcaatagcaataactgctccaccatacagcagattgaccagcgcatacatcactgctacagaaacaatctgccctgtaatcattgcgcacagacacaccaggctgtacataaaaaaagatattcccattgtagcaagcagattgattccaatatgtaccaccttcgtattgccatatgatatacatataacaaacgacataatgtacttaactatctgcggaatccacataaacagcagacctgtcaacacattagtcgaaaaaagctgacgtcttgtcacaggcatagcgtgaatcatattacatgctctcgaattatacaggtaactgaacattgccatgcctgtaaccaatgccatgacaaaaataaaaatcatatccgcctccatgctgatagccggggatattatatcaagcatatacttatgccagtttttgccataaataaactctgcattcttaaatctgctccacatggaaaacggaccgttgagtaatagcactattgtatacagtgtccagattggccagtaaagctttacattcttttgcagcattgttctattaataaatgatatctttgacttcatagtcctctcctcccatctcatagataaatatttcctccagagtaagaggcagtacatccactacctgcggactgtctttgccatctgtaatcgcctttactacagcatctggctctccacgcacaataactgtgtatactcttcctatatttgacatatgaagtactttaaaatcctgcggtatcttaggcatgccatatggacatgcaatctgaatctttgaaatattaccctgcagctctgtaagagagcgctctatcataatctttcccttattgagaatacctacatgatcacacacatcctccagctcgcgcaggttatgagacgatacaaccactgtagtattatttgcagccacatcatcaagcatgatagaccatatctgtcttctcatgacaggatcaagcccatcaacaggctcatcgagtacaataagctttggtttacagcacagcgcaagccagaatgcaacctgcttctgcatgccctttgaaagctttctgatatttcttttaacatctatagatgggaaaaactcctgcatcctgtaaaactgcttctcatcaaaatttggatacattcccttataataatgcatcatattaatcgtatcagactgcaaaaaataaaacatatcatccggtatataagccatctgccctttaatccttgcattttcatataccggctcaccatcaataaacacttcccctgcatcctgtctcattacgcctgtaatatgcctgataagtgtagatttgccggctccgtttgggcctacaagcccatagacagctcctttttccacgttcatattcacaccatcaagtgccgtaaaatcgtcaaattttttcactaaattatttatctgtatcatcattaccctctgtcacaacatcttctgtctgcatatcttgtgttacaaatctgactaggtcatcttccatgctcagctgttctttcgcatcatccattcttgttctcaattcctcaacaggtgtttcaagcacaaataactctgtcaccacctggtcaaatagtattttcaaattccttgtcatactctgcctggctgtcttagcatcagcaacaaaggttcctttaccacttttagtataaagatagccttcctcctcaagttccctgtatgcttttgcgatagtgttaggattgattgcatacttgcaggcaagcacacgtacagacggtagcttttcgtcctgcttaataacattcataacaatcattcgtctgatgccttccttaatttgttcataaataggctttgaatctcgataatttaactgcatatcgttctcccctgttcatatacgccagtaccgctgtgacttttatattaactcaaagaaccaaaaactgtctggcagcatcagttcccgcacagtgtactatccaacgtgatacacctattttaacacatatagctttaggcatttcttattatttccttaatagattgtgcgaaaattacttaagaaacataaaagctccaagatttccacgctttccatgacttgctctatgcgaaaataaaagagagggattacaacaagtgcatatattgcttatggcaatattgtcttcctgcactcctgcctccacaagcactctcctgttacattcccaaagattaagctgatatttgccgtctcccttatagagcagaatatcactcgcatgaggatcgtctgttgtcgcaaactcatccacaaaatgctctgcaacatcctgacttatctcatagcagtcctgacatattgaaggtcctatcgcagctataacatcatgtgcctcggtaccaaactccctgttcatagcaataagtgtctgttttcccatgcgatttacagtacctctccagccagaatggctaagccctattgccctatgtaccggatcaacaaaataaagcggtacacaatcagcataaaatgtggcaagcacaacatttggctcattcgtgataagtccgtccacatctgtatatggtctctttcttgtcaccccgatgccacactgcttttttccaactctcaaaacattggtagtatgtgtctggtctgtcgtaacaatctgccctgcatccgctccgattgcctctgccacccttttataattttctaagacctttttctcgtcatcaccacgcgtaaagcttagatttaagctttcaaacatcccttcactgaggccaccaagacgcgttgtaaagcaatgctctatcatagaaagctcatttaacttcttaaaatgtaacaaaggaacaacacttccgcttgaaaggacgtgcttttttaattccagaacatctttatcattctttgtaacaaaatcatttatattaatttcatcaacatttttgtgtatgttttcagcctgcatattcttatccatctttatattcttttccttctttatattctcatcaatctttatattcttatcaatgtctgtcttcatatttatatctatgaaactatatattaccgccaactattgctgtttataattgatatttatagttacttcgtaactattaagtacagaaatatgcagttgtgtaatacctgtccgtaactgccaagccaatagttattgactgccctcaaatgcattcttcaacacagtaacctcatcatcatccactgctatcacatcaaatctgcatggtgtccactcatccaaaccatgtttcataagataataccttgcaactgatatgatttttttctgcttgctataaccaactgcttcaagagccctgccgcagccgttatctctacgatatttcacctcacaaaaacatattgtatctccatcctttgctattatatctatctctccaaaacggtttctgtaattgcaggcaagtacactatatcccatatttattaactgctcagctgcaagctgctcatatatacttccaacacttcttttattcataactgcctcacatatcatataacctacacactatctttggtcaatttttgccttaagcttatccagatcattaacaaaaacaagtatctctgcaacaacctcatacaactccgttggaatcatatcacctattttaagcctagacagtgtatcagcaagcttatcgtccttatatgtaggcacattgctttccttagccctctcaataattttgtcagcaataacgcccttgcctgtagctagtattttaggtgctgcttctcccggcacatactctatagctacggctgttttgcctatgtctattccattattgttgcgattatcattttcgccatgcatacaactcacctgtccttctgaagtaagttttaatcatctgtgactattcgtaaattatcttatacactgctacgccctaatgtcaaaggaatatctatgcacctgaccggtaggtggcaaatcctttttcagaaatccagcgacaaaattcatctgtttcgaaccactatttacattcaattcacaattatagcccttatcctgtaatctcttttccaacaccggcagaaattgctttaccagtgcatatgactcatcactatccaaatagaaattagttgtaaccttcctatgaagcattttaattgacacatccgtcccaccgagatgctctaaatccaaatgtaaaaatgctgataattctttgtccggattggacatacttttcttatttgtatacacatacaactgtccgctggcgtttttttcattcatcttcaatggaacctgcacatatgtatatgcctcgtttatctgattcataaattcaatatttccacggatattatctgccagtgcctctgctttaggattcaccactcctgatgttttcaaaataatttccatatttgttatctgtttttcaattttgtcgtacaagccatcaagcttcttaggattcttctctaaatctcccggtttaatcatccattgctgttctaaagcctccttcaacataagcttaaaggcttctcctgaaaacaaatgtctcagtgtatcggcatttgccggtgtattttccaacatactttttatatcgttaagtattcctacgacactgctatcctctgaatacaaagaaatattgttttcctgtaaatccggaagcagcatcctgacctgttcattaagctcttctatctgcttatccgataaaagaaatccaatagtatttgattttgtttcattctcctgtaaaaggatggtatctattgccggagcatcatttattttctgcgttgtgtgaatgtcctgtgattcaccggaaacactgtttaatgattcaaataattcagcaatattaaagtgtttttttactacaggtgccgattgattatcacgcattattgcctcatactgtgacatatcagaagattcacttgatataaatgcctcttccggcagcccttctgtaacaatatttaaaatatcccttgcctgtgttacaagcttatacattgataaatcttcggctgaaagagcattcggcagttcatctatcaaactatccatagcaattgtaatagcctgtttgtcattagcataattttcaaactgagctgcatttacctgattaatttcaattccaagcctctttaactcaacaagtgtagtcacgttaatatccttattatcctgcacaagctgatacatctgattaaggcttgtcttatcaattggcatctgctcttccatcatcttgttcaccatcgacaaatttataccatctaccggcagtcctgcagcctttagcgcatccataagtgtgaggttggctccctcgccatcaactgtatatggttttatttctatagtgcctccatcattatttttcacctgaaaaaacacagactgtccctgttcaaatgaaaactttcctgccagccttgccaaaatctgctgaccatttgacaaggcaagcttaacctgattgccacggacactgcttactgttccctcaaatatcatcccttttgacatttcatttaaagaagataccagcttttcaactccctttgctcctgtcataggctcaccatttgccactgaattgttgtattgacttaccaaatttgatatctgcatagcatcaccctgatatagtatcgttatgtttaagtatacatgtataaattgtatcatttattggtatttctgtcactatattactgttcacacaccacaatgtaaccgcaacaatttatttctttcaaaaatcaggtaaattccaccatattcttcctataccactttggacaaagattgcgctgacattgtggattgaaccgctcccttatatcagtgtgctcaaaatacaccttccataactgctcaaacctgtctgtcttcaccggcacacttctctcaagctgtttaaattcactttcattgatataaaagcactccttaagcctcgggtgaaccactgcataccttcttctatcatcatagattacaaaattttcaccgggatacctgtccacaaaatgccacataacaaccggtatcatatcgcattttggttcaaagtgcgccagcagatagtttccattatcactaaaacgaataaaccctcttatcttgtcagcctctttatttacctttcttgaaagctcaaatacctccataacatatttatcggtcatatgctccataatcctttgtcccaccttaaatgctctgacaagaaatccaagcactattgttgctctattatcagaataatggcacaaagcatcaaatacagtctcatatatcttaaaaccaagcttcttttgaattgtcaaaattgtcttttggacctttacctcatctgtttcaatatctatcatctttgaaaaaagtgtatagtttcctccaatgcctatctcaatagaaatattgtcccggtatacttcgtgattttctttttgcatttgatttttgtatacaaaagcatcatatatagcggtaaaaatcccatttatattattatcacatctaagtattatattatccatgcatccttctccctgcagctttacaaaaatattgtctattcagatataaaatcaaatatactcatctgctcataagtacatgatttgttatcagctaaaagcatagtatccggcctttcgttatatatgagatgccttgtaatatagctttcatcaagctttgtattgtacatcatgcgaccatcacaggtgataaagtacagtgctcttttgagcacaacacccattttctttaaatctgtaaacgaaagctttgcatgctttctggcttttataatacgcctgacactgttagtgcctattcccgggaccctgagaagtgtataataatccgccgtcataatctcaaccggaaaacactccagatgacctacagcccactgacactttggatcaatataatcattaaagctctgattatcctccgacaaaagctctcctgccttaaagccataaaatctcataagaaaatctgcctgataaagcctgtgctctctctttaacggtggcggctgcccgatccccggtaatgactcatccatattaacattcacaaaagcagagtaaaatactctcttcatatcaaacctgttgtacattgcttctgctacagatataatctgataatcactctctccggttgctcccacaatcatctgtgtactctgccccgccggcacataatatttgtccggtcttttgatacttaagcttgattcccagcttttttctgcaagcttatcagccttcccgcaatctgtagcaaccctaaggcttctgtgatactctgataatcttgcagtactatcttttatttcggccatctgctcataatatgcctgctcatctatatacatacggtttttcatactgctattgccatgatacattcggctgtcctttataccattttgaataaatctcataggtgtaagaatgtttttacgcgccttattcggagcaactgccctaagcccttccgctgtgggcaactccagattaacactcatcctatcacaaagatatccaatcatctcaagaacctcagaggaggctcccggtatacccttgatgtgtatatacccattgaaatgatatttgtttctcaaaagaaaaagcgtggtatataaaagctgcatggtatgctcgggcgattctatgataccggagcttaagaaaagcccctctatataattgcgtctgtaaaactcaacagtaagcttacatacctcctcaggcgtaaatgtcactctttcaacatcattagtgcatctgttgatacagtatttgcaatcataaatacattcatttgtaaaaagtatcttgagaagcgatatacacctgccatcagctgtaaacgaatgacatattccactggcaaatgcactccccatatcagttccattacccgaacgggatgtaccactggaagtgcatgcaacatcaaactttgccgcatcagacagaatcttaagtttttccataatatcagcactgattgacgttaacataagacctcctcacatcttttcgaacatctgtttgcattatacaacatatgttcgggtaaatcaagtgaaaatttttggaaaaatattgttatggtccataagcacaaaaaccatagatatcttaaatgcattaagatactatggtttttatttataataattatcgtaactattcagttgcaaaaaatatcgtagcctttataaacagactttattccgactaaaaaatattcttaagagctactgtatgacatgattttatcccaatttagtcttaaaaaaatcgattatcctgtcccacagttcatcctggaaaaactgcatatccgcatggtcagcgccctctaatgcaatcaaatctgcatcacagccattttcaataagcttgtcataaagctcttcactctgctcaaacggaactgtctgatcatttataccgtgaataatcaaaaatggaggagcatcttttgtcaccttagacaccggagaactgttgtatgcttccttgatatttctcataatattatatccgagtaaaagtgactccatagatgctgcgcattcttcggcatctttatacttaaatgtgctaaggttagtaggtggataccatggacatgctgcctgaatactgcttgactcttcaagatattctccaacatcacgagctttatcatgatccaatgccgccatacatgtcaaaaatcctccggctgattctcccatcgcaccaaaatgttccttgtcaattctgtatctatctgcatgtgccttcaaatacctgattgcagccttcacatcctctatctgcataggatagcaaccctcatttgatgtgcggtattccacactgcaaacaacaaacccctgatgagcaagcgtgctaagatatgatagatgtgctgacttatccacccttatccatccaccaccgcatatccatactatacaaggataacgcttgtcagacatatcttccggatatattaaatcgagttttaaatccctgcgacagtgatcataccacgaatccacctgcgcatatgtaatatcagacacctgcacatattgtggcttcgtcacattaatcttaagtttttccttcatttaaaaatcctccttacatttgtaatccattttgaaatacaaaattaatatcatttaaaataaatactttatgcccattataatacatctattttcatttttaaacataaaaaaacctcgaaacaactatcttgtttcaaggtctaagaacaggggatgagagaatcgaactcccgctaaaagttttggagacttctgtcataccatttgaccaatcccctatatttaaatattatatcaaatatagaaaaaggacgcaataggaattacgtcttattttaatataccttcaaaacttcatacaaatccgatttgtttttctcagttattaaccagattaagccctcgacctattagtaacagtcagctccacatgttgccatgcttccacctctgccctatctaccttgtagtcttcaaggggtcttactcccgaaggagggatatctcatcttgaggggggcttcacgcttagatgccttcagcgtttatcccttccagacttggctactctgccatgccgttggtcgacaacagatacaccagtggtccgtccatcccggtcctctcgtactaaggacagctcctctcaaatatcctccgcccgcgccggatagggaccgaactgtctcacgacgttctgaacccagctcgcgtaccgctttaatgggcgaacagcccaacccttgggacctgctacagccccaggatgcgatgagccgacatcgaggtgccaaaccactccgtcgatgtgaactcttgggagtgataagcctgttatccccagggtagcttttatccgttgagcgatggcaatcccactttataccaccggatcactaagtcctactttcgtacctgctccacccgtcggtgtcgcagtcaagctcccttctgcctttgcactcttcaaatggtttccaaccattctgagggaacctttgagcgcctccgataccctttcggaggcgaccgccccagtcaaactccccgcctgacattgtcccattgccagttcatggcaactggttagaaacccagtactacaggggtggtatcccaacagcgactccggacagactggcgtccatccttctccgtctcccacctatcctgtacatgcagtaccgaatcccagtatcaaactggagtaaagctccatggggtctttccgtcctggcgcgggtaaccagcatcttcactggtacttcaatttcaccggatgcattgtcgagacagtgctcaaatcattacgcctttcgtgcgggtcggaacttacccgacaaggaatttcgctaccttaggaccgttatagttacggccgccgtttactggggcttaaattcaaagcttcgcttacgctaacctctcctcttaaccttccagcaccgggcaggcgtcagcccatatacttcacctttcggtttcgcatagacctgtgtttttgctaaacagttgcttgagcctattctctgcggcctgctctcgcaggcaccccttctcccgaagttacggggtcattttgccgaattccttaacaatgcttcttccgccggccttaggattctctcctcatccacctgtgtcggtttacggtacgggcacgcattacacaatagcagcttttctcggcacatggctcacacgctttgctactttatttcgctccacatcacgtcttcggattatacaacggatttgcctgttgtacacctaccccgcttgtaccggtctttccattcccggctcgtgctttccacatgcgtccctacagttctgataatgcgtggtacaggaatctaaacctgttatccatcgcttacgtcttgcgacctgtgcttaggccccgacttacccagagcagatcagctttactctggaaaccttagatattcggccgaaaggattcccacctttctctcgctactcattccggcattctctcttcttatccctccactgctcctttcggtacagcttcgtcggttttaagaatgctcctctaccactcgcattgcgagtccacggcttcggtgtcgtgtttcagccccggacattttcggcgcaggaactctcgactagtgagctgttacgcactctttgaatgtatggctgcttctgagccaacatcctagttgtcttcgaattcccacatccttttccacttaacacgcactttgggaccttagccggtggtctgggctctttcccttttgactgcccaacttatctcgtgcagtctgactcccgatcatcatctacatggcattcggagtttgatattctttggtaagctttgacgcccccgcggaaattcagtgctctacctccataagactaaatcgaggctagccctaaagctatttcgaggagaaccagctatctccgggttcgattggaatttctcccctatccacacctcatgcccacccttttcaacggatgtggcttcggtcctccattgtcttttacgacaacttcaacctggacatggatagatcacccggtttcgggtctgcgtacactgactttacgccctgttaagacttggtatcccttcggctccgcaccttaagtgcttaaccttgccagtatccgcaactcgccggaccgttctacaaaaagtacgcggttgttcatttaaagaacttccacagcttgtaaacacagggtttcaggttctctttcactcccctcccggggtccttttcacctttccttcacagtactatgcgctatcggtcactaagtagtatttaggcttacggggtggtccccgctcattccatcaaggtttctcgtgtctcgatgtactctggatcccgctcagtcagttctcctttcgcttacggggctttcaccctctccggcaggctttcccaaacctttctgctagaatcactgaatcttaaatgcggtccgaaccccggagtgcacgcactccggtttggcctctttcgctttcgctcgccgctactaacaaaatcgatgtttctttctcttcctccggctacttagatgtttcagttcaccgggttcccctccatacgttatggattggcgtatggatgatacgagttcttcgtaccgggtttccccattcagacatctgcggatcaaggattatttgcatctccccgcagcttttcgcagcttatcacgtctttcttcggctcttagtgccaaggcatccaccctgcgctcttctttgcttaatctcttcgatgcatagcgttgcatcattaataacttaaagaactttgttgttgttcacaacttggttttgtttctcggatgtcttgattgttagatattcttaagaatagaatatttattcatcaaatcatttgtatgaagttttcaaggtacactgctgtgattaccagttttagttctcacagactttttgactgttttatcagtcattagaaatcttaatctcttaaaatctctaatcactggtaaaaccagctatctaaacagcacttccctgctgatgtaggttagctctttcgagcctgttctattttgaaagcatatatgctatgctgttctttataaatccggcagccacctaccttcccataccgttaccagtatagtattatcggccgcttcagtcttaaccatcgtgttcgggatgtggacgggtgtttcccaaaagcgcatcgccaccggaaatattctgttatctattgataactcaacagtgaaaaactctctactcgatttccttagaaaggaggtgatccagccgcaccttccgatacggctaccttgttacgacttcaccccagttatcgagcctgccttcgacagctccttcctttcggttaggtcactggcttcgggcattcccaactcccatggtgtgacgggcggtgtgtacaagacccgggaacgtattcaccgcagcattctgatctgcgattactagcgattccagcttcgtgtagtcgggttgcagactacagtccgaactgagacgttatttttgagatttgctcggcttcacagctttgcttccctttgtttacgccattgtagcacgtgtgtagcccaagtcataaggggcatgatgatttgacgtcatccccgccttcctccaggttatccctggcagtctctctagagtgcccggcctaaccgctggctactaaagataagggttgcgctcgttgcgggacttaacccaacatctcacgacacgagctgacgacaaccatgcaccacctgtcactcctgctccgaagagaaggtacgattaagtaccggtcagaaggatgtcaagacttggtaaggttcttcgcgttgcttcgaattaaaccacatgctccaccgcttgtgcgggtccccgtcaattcctttgagtttcattcttgcgaacgtactccccaggtggaatacttactgcgtttgcgacggcaccgagaagcaatgcttcccaacacctagtattcatcgtttacggcgtggactaccagggtatctaatcctgtttgctccccacgctttcgagcctcagcgtcagttatcgtccagtaagccgccttcgccactggtgttcctcctaatatctacgcatttcaccgctacactaggaattccgcttacccctccgacactctagtacgacagtttccaatgcagtaccggggttgagccccgggctttcacatcagacttgccgcaccgcctgcgctccctttacacccagtaaatccggataacgcttgcaccatacgtattaccgcggctgctggcacgtatttagccggtgcttcttagtcaggtaccgtcattatcttccctgctgatagagctttacataccgaaatacttcttcgctcacgcggcgtcgctgcatcaggctttcgcccattgtgcaatattccccactgctgcctcccgtaggagtttgggccgtgtctcagtcccaatgtggccggtcaccctctcaggtcggctatggatcgtcgccttggtgggccgttacctcaccaactagctaatccaacgcgggtccatcttataccaccggagtttttcacactgcatcatgcgatgccgtgcgcttatgcggtattagcagccgtttccaactgttatccccctgtacaaggcaggttacccacgcgttactcacccgtccgccactcagtcacaaaataatcagtcccgaaggaaatcaaataaagtgcttcgttcgacttgcatgtgttaagcacgccgccagcgttcatcctgagccaggatcaaactctcatgttaaaaagttgatctcagtcaagttaaacttggctaattcgttcattcagataaatctgaatttactgttttaaaggtcttcaattttcattgaagcgttctgattgattctcaaaatctttcaaggtttctcactgttcagttatcaatgttctttgttttgctctcttgcgacagcttatttattctatcaaatcgctgttcgtttgtcaagcacttttttattttttgaactctgttttaagttctctgtcttgcgacagcctgtttattctatcaaaatgtttttcatttgtcaagaacttttttcataactttttcaacttattttcaaagcagtatctataaagtcatgtctgtaaaatgtaactcacaagctctacaactcaatgtgtcccgcgagtcagctttgatataatatcatcccggcacacatatgtcaacggatttactgcaattaattaaagtagtaaaactatcttaaaaagcacaaattttctaaattgtctgcttattatatacaattctcacaattactatctgacagcctctattgcttccttgatatttgccacaccgacaatctcaattccactaatatgcgacactcctgcaagacacactttgggaacaatacactttttaaagccaagcttctttgcctcagcaacacgctgctcggacatggtaactccgcgcacctctccgcttaagcccacctctccaaagcatatggtatcctcacgcactataatatcctttttgcttgatgcgattgcaagcactatcccaaggtctatcgccggttcgttcatccttataccgcctgctatattcacataagcgtcacagtctgacagtgacaggttggctcttttttcaaggaccgccatgagtagatttactttattataatctgtaccatttgctgtacgccttggattattaaaaaagctgtgacatacaagagcctgtatctcgagaagtatcgggcggctcccctctatggaacatgtgacaattgatcctgatgctccctcgggcttaccgctaagcatatactccgacggattttccacctcaacaagtccctccgccttcatttcaaatacgcctatctcattggtcgaaccaaatctgttcttaacacctctaagtatcctgtacgactcatacctgtcaccctcaaaataaagcaccgtatcaaccatatgctctaacgtcctcggccccgcaaccgcaccatcctttgtcacatgtcctactataaaaacagaaatacccagagtctttgcaagctgcataagcactccggttgtctccctgacctgtgagacactgcccggtgccgacgctatctcctcattgtacatagtctggatggaatctattacaacaacctccggtttttttcgttgaatcacgtcctttgctatatcaagactcgtctcacataaaagctccagtgaatccgtaaaatcgccaagtctgtcggcacgcatctttatctgatgcagggattcctcacctgacacataaagtaatggcacctttttttgtgaaagttccctgcatacctgaagtagaagcgtggattttcctatccccggatctcctcccacaagcacaagtgaccccctcacaattcctccaccaagcactctgtcaaactcggctatacctgtcactatacgctcctctttctcgctttttactgccgaaagaggcagaacctgtgccgcctttgattctttttttacttttcccgacgagcttatcgactttttatctacggtttcctctacaaatgtattccattccttacaggccgggcactgtcccatccattttaccgattcataaccacattcctggcagaaaaatacagaggtctttccttttgccatattgttctcctttataaaatacaaaaagcccggctttcaccgggctaaaaatatgctctattttcttgatactttgatatcgactgaatcaacaccctcaagctctacgcttaagctgagcttgccgccgagatttgtcttcatagtacctgcaacagctccagctatatcaatttcgtactctgtctcctcttcaaggccaagagtaatctgagcatcctcaggtccctccacagtaaatgtcactgtatcagcagtctcctcgaaatccataaccgctgttcccggaacagactcgtatacaaagagtccgtttctttcgagctttgtaatctccttaaatgtctttaccttgtagatatctccatccttctcaaaattgtcaagctttgcctttgcagccaatgtataatctccgaagctgagctttccgttttcctcagtacggattaattcacttattacagccatttttatcctcccgtagctatattgatatattaattataaatccaattctactcaacagtcaatgaaatttgtttgtttttcgtagaaattattaccttattgccgcgcttaattttgccggtaataatatcctctgacatacggtcttcaatctcctcctgaagttttcgtttaagaggtcttgcgccatattttctgtcataggctttgtccacgataaaggattttgcactgtcacgcactgtgagctctatatcaagctgttctttacagcgtttcttaagctcctttacaagaagtgtcactatatgcttcatgtcatccttgttgagagctctaaatacaatagtctcgtcgattcggttcaaaaactcaggtttaaatatacggcggacctcctccatgacactgttcttcatacgctcgtgatcctgcttttcatcctcaccagcgccaaagccaaggcgctttggttctataatagaagaagctcctgcatttgatgtcatgatgattattgtattcttgaaatcaaccgtgcgcccctgtgaatcagtgattctaccatcatcaagcacctgtaaaagtatattgaacacatcaggatgtgctttttctatctcatcaaacagtataacagaaaaaggattgcgtctgaccttctctgagagctgtccgccctcctcatggcccacatatcccggtggtgaaccaatcatctttgaaacactatgcttttccatgtactctgacatgtcaacacgtatcatggcatcttctttgccaaagacagcctcagcaagcgcctttgatacctccgtcttacctactcctgtcggtcccaaaaacaggaatgagccaatcggcttcttaggatcctttaaaccaacacggcctcgtctgactgcctttgcgacagcagaaacagcctcctcctgtcctattacacgcttgtgaagtatctgttcaagctttgcaagtcgtcctgcctctgactctgtaagcttatttacaggtattttggtccatcccgatactacatccgctatctcattttcgccgactacaggctgatttttggctcctgtgcgacagttctttctcataagcttctgctgtttattttcaagtacttccttttctgacataagcgcgccggcagctgcgagatttccattcgataaagcattttccacctggttctgcttatctgttatctcttttttcagagcaagcaactcgtcagatgatgtcagattcttaagccttatcctggctgccgcttcatccatcaggtctatcgccttatcaggtaaaaatctgtcatttatatatcgtgcagaaaggtttactgctgctttcacaccctcatctgttatgatgacaccatgatgcttttcatagattccctttaatcctgtgagtatctctattgtctcatccacaccaggctcttcaaccatcaccggctggaaacggcgctcaagcgcagcatccttttccacgtatttgcggtactcttctatggtagtggcgccgattacctgtacctcgcctctggcaagtgccggctttaatatgttagatgcatctaacgagccttctgctcctcctgcacctattatagtgtgaagctcatcaatgaaaagcagtacatttttggcatttgaaacctcgcttatcaccttcttgatacgctcctcaaactcaccacgatactttgatttggctacaagcccggacatatcaagggaaaccagtctctttcccaaaagaatatccggaacattgccactgactatatcctgtgcaagtccttctactatagcggtcttgcccactcccggctctccaatcagacatggattgtttttgccacggcggcaaagtatctggataacgcgctccatctccttttttctgcctataacagggtcaagaagccctgcctctgccatatctgtcaaatctctggaatactgatctaatacaggagtcgcagaattgtatgatgtactgtagcttttcatcagatccctgtatgcagacggatcctcacccatcgcaccaagaatatctataaacatcttctgactgttaacacccatggtgtttaaaagtcttgcagctgcacagtctccctgcagtactatagccattagcaagtgttctgtccctatctcattgcactcaaatctatcggcttcctccgatgcacgctccaatactctctgtgtccttggtgaatagccatccctgtccatcacttcgatgttatcccccggtgaaatcaggtcttcaatcatcgaaataagcttatcatattccacattgcaggctgctagaacctcagctgccacaccggtgccctcttttataaggccagccagtatatgctctgttccaacatagctgtaattcattttctttgatatacgtgcagccaaatctattgcttttttagccttacttgtatatggtttcaagtcatatcctccagtcatattcactaatttaagtcgatgaactgcaaatcatcatcctcgctgtcatcctcattgtcatcctttgcactgctgtctatagtctcagacggcttatttccctcattgacaaatccatcaagtgccctttgaagctgattctttaaagcatcctcatcagcatcgttttctgtgtcagaaacgttttcctgccttgaatcgtcttttaaatcaaactcagagttttcattctcaacagctttcttagaatcaggtgtaatttctacggttcttccgacataggatgcatttgatatattttcatccgtagccatcttttgctcatctgcagcaccttccgctgtttcttctgcgacttcatctgccggctcttctacagcttcatctgctgtttcttctgcagcttcatccaccgactcttctgcagcttcttcttccacttcatctaacgactcttctgtaacctcttcttccggctcatctgctatctcgtccgcagtttcatcagttgtttcttccaaagcttcatttgatacatcttctgctgcatcatctacatcatcatcgtcatcatgatagtccattgccttatattttctgtttttcacagctgatacaataagcaacagtaacagaataatgataataagaaccagtattgcagctaaaacaagatatttattggcaattcccggaacaagctcactctttaccgcatcgttttcctcctgtgccactgtaggtgtgctgagctcggtcctcatatatgtgccatctacgctatcatatgtgtaccagccactctcaccattgtcattcatggcatatacgaggtaaaaatcctttgtctgatcatcggttttttcgactttggtctggtaggctgttgccacacccttgccctctatggagagcgatatctcattatatccctcaggtacatcatccaccttaggcagtaaaaccactataaaatgcgactctgaattgatacggacaaactcatatgctgcattctgtgctgcatcatatacaaaaagtccattgccgctttccgactgtaaatacacaagcgtgatatcaccaaaggtgccatgaagggtattgtattcaagtccgtcaatcactgtctttgagtgctcaaagccttcaggaacaacatcctccggaatgtcatttaccatagtccactctgtgccatttatatcaaacttcttccagttatcctgcttatctgcattctccggatcatcctcggctcttctggtaacaactatattgtatgtgcttgtgctgccgtcctctgctgtcacaacaacgctgaccgtattctctccaacctcaagtgaatcattgcctgtgacggatgtcacactcgccttggaatcagccggatttgctgtaaccgcaaggcttgaacagttgtaatctactgtagctgtgtaatcctttgtcgcagcagaaaactcaggggaaagcgtacctgctgagataacaagcgaaccaagagatgcgtttgaggatttcttttcttctttgttttcattatctttatttgcattgctgtcattgctggtattgctgccggaattgtccttgttatccttgttgctgtttgaatcattgtttgatgaagcacttgttaccgtcaccttcgtgctggcaccggtaattgtacctccggcatcgttgccctctgcatctcctacaactgtacaatatgcctttatagtgcagcttcctgcagccttcgccgtaaatgaaaatgactgcgatgtgggatatcctgcggcgtcaccaatattggccacaccatctcctccgttactcagtactccctcgtcagagcttgagataactacagtaccaaaatatccggacggcatggaaacagtcaccttaactgtttttccaacagctacagagcttgagctgacactgagaccaagtccctgcgcatatacatgctcggcaggtgtgaaaacaagcatcactgccacaacaagtgataatatacatccaaataatttcttcatatctttcctcacatttctaattctgcgatatctttgatttgcccagtatgtgtctgttcatgattatcatatcaagggcatttccaccatcaccctttctgttagcatcagctgcctccagataagcacctgtgagtgttccctttcctaaaatatgtctgttgagcttaatcatatcaagagcatttacagcaccatcaccattgatatctccatatataacaatatcgtatgtctttttcagattacctgaagcatcataaacagccactttattgcctgttgcaatctttccgctgttttctgagcctgagcttgtcagaagctttacagtacctgatgctgatactgctatattcttcacaaaatcagctgcaccggttccaggctcaatgcctgtaatataagtacctatactgtatttacctgatgttatgtttacatctgtattattttggttattattgttctgattattattgccacctgcattatttgcagatgccgcctgcctgtttatattgatagtgtatgttcttgtatcaccgctttgcgacttgcattttaccttaattgtattatttccgacagcaagcgaatagcttcctgtgcctgaaacaccactgtttcctgaaacagcatctgccgaaacagtcactgagcttatagcatttgaaacaactgctgaatagcttgttgtcgctccattaaaggccggtgtgagtgttacaccacttatcgcaagcgactgcagatagttattggtatcgccagctttatcgaagcccactgctgacgatggcatattgttgtatacaggtattttaaatacaaaagcctgattcttgtctgaatatcctttagccagactctgtccctcagtaagagccgctgtggcattgcccatgtactgatggaaatacagcgagcttgtatttactacattaaacttctcaaaatacagtgtattttgacccttatttatataattgctgcccacctttacagctccgccgtttatggactttactcttgtattccagccctgcttcttggcaaaagacagaccatttttataaatcttatccttcgtgtttccggttgcactaaaattaaaataattataatatccttcatatccggaatatgtacccgaaataagagggctcgttcccttttttccctgctcctgctttatacgcgatgctatatggtatgcacttactccactgctctttgccacatccatgaatgtgcttgcataattgattttctcgccattgttggaataggtctttgttccctccataaatgtaccttttactatggacttgacaccttcaagtgcctcattcggactgtatgccagactctgaaactgaaaaatattggtctcatcaagaaaattccttggatccatgagataagcaatataggcactgcttgctgacacccatcccggttcgtactcaacccacgtatttgttgaccagttataggctccggcagctgtcgatttcttggcattgtctgctgatttagacaccagattaagtccattgatactctcatttttaatcaccgtattccagtccagccctgtatttacagcctcaaatgtccagcttggatacttattgtgaagagctgtaaggtttggaatatagctgtcaggaaagcctgcattcttcatagccgtgacaaaatcagtattgtctccgctattattgtatgtcacctttatgtatgtactgatagtccagcccgtaaatgccttgccgtttaaagtacccttgacattataccagaccacaccgtttaccctggtctctccaattatgtcaacctgatggttccagttgagtgagacaaccttggtagtgccggatgtgcctgctgcattgcggacatacacattgccacctgtaatcgtacctgtagcatatactcccgatgcggttgcaagggcaagctgttcctcattattctgctgtatggcatccgcattgccggtgtctgccgaagcctcccctgtctgcgcattgtctgatgcagctgtgccggtacctgctgatacaaaatcagacctgatatagcttacacactcctcattatttgctgccagattgtactttgccttgtaccacaccttgccgtctgcacctgtagtctgctcaagaatagtaatatccttgccgtttgaaagcttgtgctccagctcatactctgtgcccggtccgcttctcgccgctacccagtatctctcatcacacacaaccttagccgcctgatccgcatagactgccatgctgctgtatggtgccaggtcacatgcagctaatgacaatgtaacgacagaggctgccagaaatttatttatctttatcatcaaatcccatctttcttatgtgcattgtttacattaatccattatccatttaattataatagaatatgacctttgtatcaatgtattcggcagaaatttattatttttttattaatgatataaaaactccctgaaacgtgcagctcatgcttacgtttcagggagttgcctgattcatattctgcttattcttactgtctcctgtagcttttctagctgaacagggattttatcttatcccataaatccatgaaaaagttgccaagcttttcccagaagcccgggtcatttatcttatcgccaagctttgatgcccagtcctgtgcctggttgatgactgaatcccagtcgatattggcatcctttagcttcattaaaagagatgtaagctttgcaatatcatcatcagaaagcttcaggtcgtaatcctttgcagcctcctttatcgcatcctttatctggctctcatccttgagccttccatcggcaagctgcttctttaggtctgcaatcattgcctcgatatcctgcgaatcgccgtcaatgctcttgttgagctctcctgttgtgacaagctcatccatcgctgcgtctgtcaccttgtcgtcaagcttcttgcctgtcatctcctcgtatgcctttagtgtgcctacaagtgctgccgttccggaaatagggaacggtcctgcgactatgattttagcatcagctatgcctgctgtggcaagcgcattcttgtacattcctaccgtacagtaattgatattgtgtgtggaaacactaagacccgcaccctttttatcctctgtaatgagtactgaggaaagtgaccttgtgccaatctcgctcttgctgatgtatgaatcgaggtacttgtgctcctcatcattatttacatagaccacatcgtaattgtccagatcagtgagctcgattcccataaatccaagcactgtcgctctctgatccggtgtaaggtctgctccaagacttaagtatggcttatcatttttgctgatggtcaccttgtcgtttgcctcactgccggctgtcgttgtgctgtctgcagtactgtctgtgttactcttatcagctgagtcactgcctgatacatcaacgcttgaaactgtatcagtctgcgtagctgtctctgttgcaaatacagccggattcattgtaaacagtgtcaccgcagcaagcacgctacatacaatactctttgcttttttctttattaatctaatcatttttcctccaatctactgctctatatcatacgaaattgtaaagctgcttccgtcgaagctgacatctgccatgcttccgcataccacaggcatcatcggcgacatatgacctatatccaggtccatgatgattggcacattaaactctctaagcagtgatgaaagcgcctgtctgtggtctatgccaaacatttcctctccgaagtgcgccggtcgtccgataagaaagccctttacatttgaaaaccatcctgcatttttcatctgccacatagcccttctcatgcccatcacattaaggtcacaagcctcaaggaaccatatgataccatcatcactgtagcgctcattaaattcccttacatggtcaaacgatgtaccaagcagattgataagacaatccatgcagccaccaagcagcctgcctctcatggtaagcctgctttcctttgccaccgcaggaatagagctgatacacgacttttcagtcaggttgtagcccacaaacggagcattctcatcctttatcgattccttctcccacatagggtaattggtaaatgaaagcttcctgccacaaagcagattaaatgcatcggtaagtgactcatgccacacctccatgccaaagctgcccgcacacggcccgtaaatacctgctgtatctgcaatagtagcctccaaaaatgtgaaattcgtattgtcagaatagcccatgtaccatttcggctttgactgcttcacgcgctcaaaatcgatataaggcactacctcgcacatcagctcgccaccaccacaggatataagcacatcactgtcagcagaagcatagctctcgttcagctcttctgcgcacttcttaggtgtattgctgatacctatgccactgtcgcacctgcagttaggtccctctatcgtcttataacccatgctgtgaaaccttttaatggcattgtcaaaggcactcctgtacggctctgttgtacagcccatcgaaggcgccacaaagcctattgttcctctatcctttagaaattcagggtatctcatgtttctatcatcctatcactattatttacatatcttagcttctgtctgaagtaaaatatgtaggattttatcatttctgtcaaggtcattttactgtcataattaaatgtcgtcgtgtactgcacatgctgtctgttgcaccagttgtatatatcatgcagacttatcgaatcaacattcttcatattgttcataaacaccttaacctttgaaagctcatcctcactgtcaatgtatagatgaaagatagtattcggacattcaattattatctgctgttcttctatatttttcatcactgtatcctctattgaatgatgtatcctgtgtgattaaaaacattatcgtctgtcacaccgggatgtgagtaataacaaaatatcgtaactgttcagtaccttcacagctaaaaaatatcacataaccatagtactacaccggcgtcacaaaatccagtcatttttgcctgccaattcttactattttattaagaaaaacggtaaatattatactccctcacagtcaaatgccggaatgaagctgtcctttgccacgtcaccctcctgtataaatgcattcgtgattcctatttcgagggcatagtcaacaagcctttcatactctctccttgtcactgtgcggtttatctcaggataatcctttagtgcaatcggcgtaaactggctcatcatgcttatatatacgtgatcatgatatgtatcatacaggtacttaagtacatcctttgcatcattcacatgtcccggcagtagaagctgtcgcacaataactcccttttgtatgagtcctgtcgaatcgtcaatcacgacatccggttgctgcctgaccatctctgaaagcgcctgctttgcgacagacggataatcttttgcccttgaataccttgccgaaagcgtactgtccatatatttaaaatccggaaggtacacatccactataccctcaagcagctttagctctgtcacattttcatatccgctcgtattgtatataataggaagcttcatgccgcggctttttgcatcgtttaccgcccacactatatcagggatatactgccccggtgtgaccagattgatattatttgcgcctttgtcagcaagttccataaagatatcactcagccgctctttactgattacctttccctcttttccgtcagaaatttccctgttctggcagaacacgcagtgcaggctgcagcctgagaaaaaaactgccccacttcctctttttcctgatatgcacggctcctcccaataatgaagtgctgctcgcgccacctttatttcagatgaaacgccacatacgcctgtttgtccggttcttctgtttatgccacattttctgggacacaataagcaattctcgtatttattcatatttttcattttaacccttgctaaaaataatgtttgatactacaatctatatgattatgcggtgcatatgccatgcgccttcattagtcattttaaagttataccataactattcttacagaagagaatagttaaaatacacaataaggagattacaatgaatcagtcaaactgtatcgtcgcccagtcaggcggcccaactgttgcaatcaacgcaagccttgcaggagtcatctcaggagtaaaaagctctgaaaaatacgatatctgctatggcgccgtaaacggaatactcggcatattaaatgaaaattatctcaatctgtcagatatttttgcagatgatgctaatcttgaaaagcttaagaccacacctgccatgtatcttggctcatgccgccacaagctccctgattacaaggatgatgattcaccatatgtatacatcttccaccaattcgataagctttctataaaagctttcttttacatcggtggaaatgattcgatggataccgtattaaagttatccgattatgcaaaaaaaatcaacagtgatgtgaaaattatagggattccaaagaccatcgacaatgacctgtgcatgacagaccacactccgggctttggctctgccgccaaatatatcgcatcaagcatgcttgagatagcccatgatacctttatctatgctgttaagagtgttacaatcgttgaaatcatgggacgtgacgcaggatggctcactgccgcttccgctctcgcacgtaatgagtacaatacagcgcctcagttcatctatctgcctgaggtgaatttcgacaaggacaaatttgttgccgatataaaagaagcccttgcgcacactaacaatgtaatagttgccgtatccgaaggaatacatgacgcagacggctcatacattacatcatcaaaggccgcatgtgaccagttcggacaccagcagctaagcggtgccggaaaagctcttgagttcatcgtaaaggaaaacatcggtgtcaaggtgcgctctgtagaggtaaatgtgctccagcgctgtgcctcacaccttgcatcattaaccgatatcgaggaatcttttgctcagggtaaaaagggtgtcactattgcagcagagggtgtgaccgcatcaatggtatgcttaaagcgcatctcaaatgatccttatcaggtggaatacacatattctgctatcaaggatatcgcaaacgaggccaagtctgtgccaagagagtggatcaatgatgcgggcaatgatgtgaagcctgaacttatcgaatacttaaaaccacttattcagggagaaaccgctgtagcctacaagaatggtctgcctgactatatggatgtgtcacatcttcacaaatgtaactgattttagctgctgtctacaccccggtgtgggcagcaacagcatatctccaaggaggtcgatttacatgaagaaaaaagtgcttataacctgcgccgttgtgcttggtgtgcttttggctgtttatcttggctttaccttttattttagcagccactatctgttcaacacaaagattaactctgtaaaatacgcagggaaaactgcaaaagaggcattagaaaaaaatacagccctaagccgcgactatctgctcacaatcactgatagaaaaggcaacagcttttcacttaagggacctgatttttcctatgaatatgtctcaaacggtgacgagaagcaaatcctaaaaagtcagaatgcttttacatggcctgtcagtctcttcaaagctcaaaactatactctaaagggttcgtccaaatataacgatgccgctttggcggaaaagctcaaggctcttgatattttcagtgatgactacattgaaaatccggaggatgcccatatcgagataaaagacggcgaatacgatgtgattgaagagaaaaaaggctgcaagccgatatatgacagcatccttgccgaggtaaaggacgccctggacaacgagcttccaaagcttaccttaagtgatgactgttatgaagctccaaaaatcacaaaaaacagtgatactatcaaaaatgaaaaagaagccctcgacaaatacactgcttcaaccgtcacttacaaaattgaaggtgccgacgagaagcttgactcagccaaaatccttgatatgctaagtatctcagatgacggcagcgtgagcatagatgatgccaaggtcactaaatatgtccagcagcttgcttccaagtacaatactttcggccgcaagcgctcgttcaaaacatcgtccggtgacactattgaaataggtggtggagactacggatgggtagtcagcaagaaaaatgagaaagcccagctcctttcagatttagagggaggcaagccagtggaaagagagcctgtttacgagcagacagcactctaccgaggcgctgacgacataggtaatacatacatagagattgactacacaaagcagcacatgtggtattacaaggatggtgctctccagatggagtctgatttcgtatcaggtaatctcgcccgtcagaatggttccgtagatggtgtatacaagattgtttacaagcagagaaatgctactcttgtcggcgagggatactcttctcctgtcagctattttatgccgtttgcctacaatataggtatccatgatgccagctggcgtgataccttcggaggaacaatttacaaaacctccggctcacacggatgtatcaatgtgccgcctgcttttgcagagcagctgttcaacgctgtggataagggcactcctgttgttgcctactacagagaggctgtcactctgacaaacaatgctgcaaagatgtccaatgcatactcgtatgtggctcctgatgctgcgcaataagtgtgaattgcttggtatttttcaataatacgggaaggggcgtaagtcgccggagtgactgccatacagcataggcgctctttcgtaagcgcatagcgtagctgcctagatactgtagaattatgcacacgatacataaaaatgagctcccacggatgggagctcaaggagaaccgcgccatggacggcgcgtttcgacggttttgtcgggcatagaagccctaaaagcataattcgtacagtatcttggcagagtagcgtagcgaacgagagagtgcctatgctgtatggcagtcactccggcggcttacgccccgtatttctatagccctatgctatgcaaactggctattgtagagatttgcataaaatccgtccgctgcaagcaggctctcatgattgccctgctctataatctttccgtctttcataacaaggataatatcagcttccctgatggtagacagacgatgagccactataaaactggttctgccctgcatcatggtaaggaatgccttctgaatcttaatctctgtacgtgtatcaatcgaagatgtagcctcatccaatatcagcataggcggtaagcagagcatgactcttgtgatgcataatagctgcttctgtccctgtgacaggctgccgccgtcctcaccgatttcagtatcatagcccttcggcagacgtctgataaagctgtgggcatgggatgcctttgctgctgcaatgatttcctcatctgtggcatcaggctttcccattatgatattgtcacggattgtacccttcttgagccatgtctcctgaagcaccataccatagttgtcacgaagactctctcgtgtgatttttcggatatcatgtccgctcaccttaattattccactgtttacatcatagaatctcataagcagattgataatagtcgtctttccacatcctgtcggacctacgatagccacgcgctgtccaggctttacatggagattgaaatcctcgataagctttttatccggcacatatgagaaataaacatcctctatgtccacacggccgtctgcctcatcgagtgttaccgcatctgaagcatccggtatctcttttttctcctcaatcagctcaaagatacgagcagcacaggcaagtgcgttctgaagctctgtgatgacacccgatatctcgttgaacggcttggtgtactggttggcgtatgataagaagcatgaaagctgtcctactgtgattccgccggtgagtgcactcatggcaccaaaaattccgactccggcatacacaagactgttgacaaaacgtgtactcggatttgtaagacttgaaaaaaatgttgccctcagtgagcatttctgtaatctgtcatttatctcgtcaaactgctctagcgcctcatcctcatggttgaaggcctgtacgaccttttcatttcctactatctcgtcgatgagtgatgtctgctctccccttgttcttgtctgcagctgaaacatggaatatgtctttttagtgataaagcttgccacaaaaagtgacagcggtgtgatgagcactacaatacatgatatcttcacatctattgtaagcatgaaaataagcgtgcctgctattgttgcaattcctgtaaagagctgtgtgaagcccatcaaaagtccctctgaaaatgtatctacatcggcgatgatacggctgaccatatcaccgtgtgagtggctgtcaatataggaaagtggcattttttcaatgtttaaaaatgcatcacgtcttatatccctcactatgttgtaggtcatcctgttgttgcagatatttgtaagccactgggctgctgccgctatgacgactattattgctgctcttgtgaggatggctgtcatagccgtaaaatcaacctttccttttcctacgatcaaatcaattgcgcgtcctgtgagaattggaaaataaagcgtaagcgccactgtaacaacagacagggcaagtgaaattacaagcaaaggaatatatctcttcatgtagcttaataccttgcgcattgtgcctgctttattcatcttcgcattatccgtagccatactctacacctccttttgtctggtcatatccgactcttttttaaactgtgaatcatatatctctttgtaggtctcgcatgtctcaagcagcttttcatgaggtccgaagccaaccatctgtccgtcgtcgagcactatgatattgtccgcaaactggatagatgaggtacgctgtgacacgataaatattgtcttgtcaccatgcatgccctttaatgccgcgcgaaggctcgcatctgtagcaaaatcaagtgccgatgcactgtcgtcaagtatcagtatgtcaggatcctttacaacagctctggcaattgtaagacgctgcttctgaccacctgataagttcttgccgccctgctctatcatgtagtcaaggcctccctccttgccctttacaacctctgtcgcctgtgctatatcgagtgccttccacatttcctcctctgtggcatcatttttgccccagcgaaggttgtcggctatcgttcctgcaaaaagcactgccttttgcattacaacaccgattttgtctcgaagctgcactgcatcgtagtcatttatatcatttccctgaatccttatagtaccctttgtggcatcataaaacctcgggataaggtttacaaggcttgattttcctgaacctgtaccaccgatgattccgattgtctgccccttttgcactgtaaagcttatatctgtgagtgtctcatcggccgctccctcataggtcatgcagacatggtcaaactcaacctcaggtgcgccatcctttgcaccaatgagcttaggatttttctcaggaagctttgatggaatagaaagcacatccgctatacgattaccgcacgccactgccttggtcacctgtacgatgaggtttgcaagctttatcaactcgacaagtatctgtgacatgtagtttacaagtgccacaacctcaccctgtgtgaggattcctgcgtatacctgcttgccgcctgatacgataacagcgattgttgcgatatttataatgataaatgtcagaggattggtgagtgctgagattcgtcctacaacctgctgcatattggttaaaagctcgttgtcccttttgaagctgtcaatctcatcattttgcttattgaaagctcttataaccctggttccctctaaattctccctggtatgtgaaagcactgtgtcaagagagctctgcacctttttgtaaagcggaaggcttgcagccataactgagaataccactattgaaagcagaggtatggtaactacaaaaaccattgccgctcttacatttactgtaaaagccatcgccatagctccgaatacaataaatggcgagcgaaggaagagtcgaagcaccagattgactcctgactgcacctggtttatatcgcttgtcatcctcgtgataagtgtcgatgtgcccactgtatccatctttgagaatgacagtgactctatcttttcaaacaatatatggcgaagctttgtggaaaaaccgactgccgcctttgccgcaaaatactgtgctgtgaccgaacttaccagaccaactgccgcaagcagcaccagcacacctcccatcttccatatatatggcttgtccgaagccgtaattccgttatcaatgattgccgccatgacaagcggtactataagctcaaatgatgcttccagcagcttaaataacggagcacagatgcattcctttttgtactccttcaaatattttaatatctgtttcatcttttcccctttcagattttatgtcgccgattacagcttcactattatagatgatttttctcatatatacaagaaaaacgatacactaaaaaaccagtaccatgcggtactggtttcatatatcagctcttatgtatatgcttcttgattgcttcaaagctctcaggactgatgacatgctctatacggcatgcgtcctctgctgcaatctccttatctacgccaagcttctcaagacactctgacaaaagctcatgtctttcgtatatcatctctgctatctgtcttcctgaatctgtgagtgtgataaatcctgcatcactaactgtgatattgttcttctctctaaggtttttcatggctatactcacgctggatttcttaaatccaagctcatttgctatatcaactgagcgtaccacaggaagcttcttgctgagaataagtatggtctctaaatagttttctgatgattcattgtttcgcatttcgaatacccccgtgagtttattttcgttcgttttaattcagttatattattataacatacattttattgtttgcaaaacttttcttttgatttgtacgtgatttataaaaatccaaaaaaatatcaaaatcccatatttgttattgacttctaatttatgttagtgtatactaactatcgaatcagaaaacaaacgtatgcatgatatatttctaaatcttgtatgccataaatgtttaattataccagataagaccggccgatcaccggtcttatttattctataaaaaaggtaactatttagcttatgcgagggctctctttagcctgtcaagcccttccataagcacagaaccggggcatgcgatattcaatcgcacaaagtaacggccattgcctccaaactcagctccctccgacagataaaggcctgtcttttcgcgaatcatctgcgtaaatgccacagaatcatctgtgagtgcactgcagtcaagccacatgaggtatgtcgcatcggcatccactacatgtatctgcggcagattttctgccatgaagtcacagactgtttttcggttttcccaaagatatgttctgagctcctcaagccacggctccccctttgtgaatgccgcaactgctgccgtgatggcaaatgcgtttggctccgccacctcgtctgtatttaatgcgcgccataccttgtggcgcaaaaatttatttggcaccatcactgccgcagtctgtaagcctgccatattaaagcacttggtcggagcaatacaggtgatgcttatatcggcgcagtcctctgatgctgccgcaaacggcacgtatgattttcccggtgctgtgatgtcgcagtgtatctcgtctgatatgaccgtcacattgtacttcctgcagagtgcacctattttcgcaagctcatcctttgtccagatgataccgcacggattgtgagggttgcaaaatatcataagcgaggtctgtggattggaaaggtcatgctccaacctgtcatagtccacaaaatatctgccgttttcgtatccaagcgggctttcctgcacatttacgccgttattaaatatggaattaaaaaatatattgtataccggtgtcatgataagcacattttcaccgggtgttgtgagctttcgcactgtagatgatatggccggtacgacccctgtgcaaaaaatcaggttgtctctttcgattttaagcccatggcgcctgtcccaccacgaaatatacgcatcattccactcatccggaatgatggaatagccaaacactccgtgagaaacacgctctgatattgcatctattatctggggtgctgtcttaaaatccatatctgctacccacatcgggagctcattttctgccacatcccactttagtgagcctgtatttcttctgtctacaacggtgtcaaaatcatacatagattattttccctcacatattatcttagtctttgatgggtcaactctgtccttttcgatagtcagtgtgccaatctcctttgcccttatcactccgcttgtcggatttaaaacactgtccaccttactgcaaatctctgcatctaccgaagaatactcaaatgccaatgtagtgtttatgagcttacagtttttcataacaaggttgtcgatgtagcaaagcccctgcaagctctcgattgtgcagtttataagtgtcagattctttgcgttccagccaaggtattcacctgtaataaatgaatcatagaccgtgacattttccgtattccagaaggcatcctttgagataagctttgaatcgtgcacctctacatttcttgagccgtcaaacgaatagttgccgaccagctggaaattcttcatggtaagattatttgtattcatgccaaaataatctccctttgccgagacattctctatatcgacatggtcacagctccagagtgtctcctgggcatttggaaacgtcacatttttaagctttaagtaattgcagcgcctgaagttcttaggtgcctcaactattgaatcagtgacagagatattgtctgtataccagacacccgcacgcgccatgtcaaaccatgtacagtcctttacagctatgtcactacagtaccatagcggatatttccatctaaaaaaacagcctgtcaggctaatgccatggctctccttaagaggtgactctccgtcatcaaaaattgtatcataaatatccaggtcgttgcttgcaaacagggctctttcgcctgtcagaaactcctgatggatttgttttctttcgctcattatatatactcctttttcccggtaattctaaatagttatctgccataaaatcaaataaccgccgaacacataatatatgcagcccgacagttatcattataccccaaaccctactgaatttatagtattttatataagtttaatattacaaaattaatattaagagcctgatatttacagctcaagcccgtcaagtatgctcttaagtgcatcagcagactccttgagctttaaagcttcctcaccgtttaactcgattgggatatcactctccactccgtttgctccaacgattgcaggcattgagagaaccacaccgtcgatgccgtactgtccgtgcatcatgtgtgaaacaggaagaatagacttctcatcacgcatgattacctcgcagatacgtctgactgacatagcgataccataatatgtcgcatgctttcgattgattatctcgtaagcactgttctttacgtttgcagcgatttcctctgtattctccttgtgcttgtagtgacctctcatctcgcacatcttgtgaagctctactccggaaacattggctgatgaccatgcaaccacctcactgtctccatgctcacctactataaatgcatgtacgcttcggctgtccacctcaaggtgctctccaagcgcgtatttaagtcttgcactgtcaagcacggtacctgaaccgatgacacgctcctcaggaagtcctgaaagcttctgtgccacctgtgttaaaatatctacaggatttgcaacgataagtaagattccaccgaaatttctctttgcaatctccggaatgatgctcttgaagattgcaacatttttatttaccagatcaagtcttgtctcgcccggcttttggcctgcacctgcagaaacaacaatgatagcagcatctgccacatcatcataaccacctgcatatatcttcataggtctggcaaaaggaataccgtggcttatatccatcgcctctccctcagccttgtccttatcagcgtcaatgagaactatctcagaaaaaagaccgctctgcataagtgcaaaaactgatgccgaaccaacgaatccacatccaatcattacagcctttcttgggtttgtcttaacaactgcgctagttttattgctcatgtacgttcctctctttcttaaactataattcaaatagttgctttttattataactattcatcccaaacacaaattctcaatatctgctttgttatcagtagttctgaataattatcttttatttatattatacccgcattgtacatataatccgttgtaaaaacaacaaattacttgataaaatacaatcaatagccaattgttcccatttttatacaattttaatacagattttcacacaaaaagtgcaatactaaaaagcaaaccggaccaatacagctgaatgaattgtcattttgcatattgatccggttatattaaaatgctgcatccgcttattttgtgcttgaatttctgtactcaagtggtgtcattccatacagcttcttgaactgtctgttaaaatgctccacgttctgatatcctgcctcgatcgcgatattctcaacagttgtgatgctgtttctcagcagtgtgcgtgccttcttcatcttggcattggtgaccagctctccgaaagtcttgcctgacttctcctttatgtacttggagatatacggctccgtcaggttgaactgtgcagccatgtctgcaagcgatactgtcttgtagttggcctggatgaagttgagcatggcaatatagcgctcatccttcacgtgactgtcagccttggtggcaagataatggtttaccgcaacaacaagcgctccgattgatgccttgatgatatcctcatccacacctgcgccccagaacatactgccgtcaactgtgatacccacatatgccatagcctttgatgaagatccgtgtgaaagcgcatgctcctcgtatacagtgagctcaaagctgatgtcaaaatactgcttaattatattgctgactgcatcgagacggccgtttccattggcatctacctttctggtactgtcattgtgtaaaataaccgcctctgcgaaaatgccgtttacctgcttaaagtggcactccggtatagtgaaatatggatgaaaatccacataattgtctgtaaagatactgtgtacccactcaggtgaaagctccttgtgctcctcgtccgatacctgcttgaccatgtatccgacctgctctctcatctgctgtggcacattgataccgaagctctgcttaaggatatatgccactccgccctttcctgactggctgttgatacggataacatcagcctcgtatgtcctgccgacatcctttggatctataggcagatatggaaccgtccacttatcaagcttcttttcctctctccatgccatgccctttgagattgcatcctgatgtgagcctgaaaaagcagaaaaaacaaggtctcccgcatatggctgtctctcgcctaccttcattctggtaaatgtctcatacttttccctgatctcaggcagatttgaaaaatcaagctgtggatccactccgtgtgagtaaagattcatggcaagtgtcacgatatctacatttcctgttctctcaccatttccaaacagcgtaccctctatctcctcagctcctgcaagcacaccaagctctgatgtggcaacaccgcagcctctgtcattatgaggatgtaagcaaagcactactccgtctctgtacttgaggtgcttgttgatatactctatctgtgtggcaaaaacatgtggcatagcattctctactgtggtagggatattgatgatggccttattatcagcctttggctgccatacatcaagcacagcgttgcacacatcaaccgcataatccacctcagtacccgaaaagctctccggtgaatactggaaacggaaattaccgtcagtctctgctgcaaggtctctcagtaaaacagctccgtcaactgcaagctgctttatctcttcctttgacttcttaaacacctgctcacgctgtgcaacagatgtggaattgtacagatgtacaactgctctcggtgctccctcaagtgccttgaaggtcttcttaatgatatgctctctggcctgtgtcagcacatgtatagtgacatcatcaggaatcatatccctctcaataagagctctcgtgaaattgaactctgtctcagaggctgccgggaaacctacctcgatttccttaaagcctatatctacaagcatcttaaagaagtcaagcttctcctcaagactcatcggctcgattagagcctggttgccatcacgtaaatcaaccgaacaccacagtggtgctttatctatataatccttcttaacccagtcataagtgcattcaggaggcagaaaataactgcgctcgtatttttcatatcctttcatcttaaaacctcttttcgtttgaactgatataattgtaacacataagcgcagttattggaatgattatatttaatcactttgattgatgtaatttaattttttataaaaatataatcaactttattgattttgattattctaatcagatatttaggctaaaatatccggctaatcctctctcttattaccccagaaaaacaatgcaactgttcccggaccggtgtggcttcctatagtcgtaccgatatcatttatctctactttgcccttcatcttagggaaggcagcctcaatcagatcagctacggctttagcatcctcatagcatgcagaattcgatatatagaccttatccgaataatcggcaccatccttgcagagtgcctgcatcttcacaagcatctcctttattgccttctttttggtgcggattttctcacgcacaataagctttccctcattgctcacattcatgaaaggacagatattcagcacatttccaacgaatcccgcggtctttgagatacggccgcccctgataaaaaatgtaaggtctgatgagaagaaccagtgattcacctcaagtctgtgctccatggtccaatcagccagtgtatcaatatccatgccgctatccctaaggtcagcgagcttatccatcaaaagaccaaagcctgacgatgctgccagcgaatcaatcacatatatctttctgtcagggtattcctccttaagagcctcctttgcaagccttgccgagttgactgtacctgatataccggagcttagtgtacagtgaagcacatcatatccctcatccagaaactgtctgaagtactccatgtactcctcctgattgatctgcgaggtctttgtcatggcaccggcttccattgccttgtagaaatccggcagtggcatggactgtcccagatcatccatatactctttgccgtcgagctcatagtgaaagcatgcgtacttaatatttctctcgagcatatgctccctggtaagatctgctgttgaacagcagctaatcacataatttgacatattattttcctttaccttttgaccttttatcattatatgtagtcagatacatatggtatctcatgatataaaatatcgtcaagctttgcaacagcatcatatgtagtctgtattttgcccatctgcaaaagcttctcagcactcttgtagcctaaaagcagtgtggtaaacgtgccaatagacatgcttaggtgatactgtggatttttgtcggtgagagcacagtgccctttctcaaaatcaatgacaaatgtaccattgttccaaggaagaaggtcatctgctatctcaaagctaaagcagccgcccgggccatccgggtcacagttatactgtgatataaactgcgccacgtcgatgattctgcccatggcgtatggtcttattgtctcctttatatcactgtcatcgagctcaaaagcgatgggctcgctgtaatagttgttgcctctgacctcatcaatcatggaatcgtgcgcatgaatgtactcccacagaccaagctgcgcctcacggtttaagtagatgagctccttgatgtgcatgacatcggagctgataagatacaccatatagccacacggttcatcatcctcgttatagtagatggcgaccatcgtatcgtcctcatcccagcggaagtactcctcccaagccagattgtttctgtacagacagccgtgagtcttcgcggcaaagtgagtatgaagctttttaaactgctcgtcatcccactgcacacggcgcacatagcccggctccttaagctttgtaggaatctgtctgtcctttatcacatatgtcatcttgtttgagataatctcccagccaagtcctctgtaaagaggtatggagtatggatacaaaagagcaaacgacttgttgctatcgcgcatcctcgtaagactctttctcataagcttcttcatgagaccatggcctgtgtactcaggatacgtgcacacacttgtgacaaagcctacctcgtagcgctcaccatatatattcatatcgagcggatataccgcaaactgagccacaagctcctcttttttgtctatgatattgaagcagccaagcacatcagctctctcaagcaccggaaacttcgactgcttgatttcatcatccttccaaccggtctcggcaagatctgcctctgttacctgaaaagcataacgaagcagtgcattgtattcctccgcatcatcctttgtcaatactcttatcttaaattcatctgatttaaaagaatgcatagtgtcctttctcgcctgtctttactgtatacatcagatcgtccgccttcttaatcagctcagtaatctggctctcactggtgacatttctctcatatgaaataccaatagaacaagtgatattcttctcctcattaaactctacatcatgattcaggtatttctttatctggctgctgaagccatcagcctctgcaatcctcgcatagatatcctttgcaatattctcaagctcgtatctggcgcatgactcaatgactatgatgaactcatcaccgccatatctgctcacaaagcctctgtccttagcaacttccttgaacacaaaggccatctccttaagtatcaaatctcccacatcatgaccatacgtatcattataatgcttgaagttgtccaggtcaataaacataagccccacatccattccaccggatgtcacacttatgcgcttttcaagcttttcaatctcctgatacatacctgctctgttatagataccggtaagcatgtcagtgatagctgcctgcttcagcttcttgttcatctcattagccttttcattggcctcaatacgggcaatggaatactcaagctctctgaacaacagcttgaaaatgctcaaatcatcctcgttgagcatgtatcgctcgattgagccatgccagttgtccttcatacgcacatatgctatgagcacacttgaaagtgcatcattcttgataaaaggcactgcgacaaatgagcatacatcatccacgccgaaatacgagatgacattttcatactcgtagaagccctctgcaatctttgatgtggcaatgccctccggatagtctatcatgatatcacatataccctttataacctcatctgtcatatcacagcccgtatcattataaagcacctgcggctccttcgcgtgcagatctataatcagcgcacagtcaagactgaaatgatttacgaaattgctcatggcattttcaatcatggtgtccttcttctggtcattgacatcgataatggtctgccatatggaaataaactccatctgacgctttgagccctgataatccttttcgagcccatgctgctttacaagcatattaatctgccgctcattgatatggccatcactcagtgactctaggttgatattttttaacatgtcaagcggagctgcctctgctatttcatgcatccttttattgtgtgcctctaaaagtattctctcatgctctataagctcatttttgccgagcagctcaaacagcttcatcctgctttccctgtatatcgaatatgcaaaaaattcgtttccctccgcattaacgagatatctctccgcatcctcaaaacgtaaaaaggcttcttccttttcaccatcgtgccacaagagcatggctgatgcaaaggagtaaaggaacatctcatcatcgcatctggaatagtcatggactgcctcagttcttgtggtgtcaattactctgtagatgacataattaagaaactgcttgcagctgagcagatagcgctcacagctgaatctgtcacccgaaaatatagatgcaagcgcaagaagcgcatataccttactcgtgttgcacactcttaagctgtttagatgaagctttataatagtcttcatggcaactaaaagtgcatggacagcctccttataattgccctgcatgatatagttaagagacttgttataatacacctcagctatatcctccggcatcttcaggtaatataacatattgattgcagcattgtaataattgtcaaccagctcatttttacccatggcacttaaattgtagcctatagacgtaagcactctcgcaacatatatattgccgtgccccttcatgaactcgtatgtacggataacatataaaaaggctatctcattgagaccgcttgtgctggcaagcataatagtcttctgatatgcatcatacacaagctgctcatttcctatctccttcgcaagctcaagccccttcgtaaaatgctttagtaatgattcatcataaaaggactgcttcaccacatcccggctattgtcgtatgcgtaaatatatatatgtgccaaatgattcctgtagccgtgctttatgagcttttctataatttcatcactgacaggtatatcctgtacacagaagaatatattgtaccagcctgacatctttatcatgactgacaaaagctctgccttaaatatcagtgtgtcatcctctgccaaaactgcatagtcataggcactctttgcactgtttccggccttctcaagcttgccctgatacatatagcaggtgcccttcatgaaataatacagcgaaagataatgctcactgtcattttccggtatcagcgccttgtattcattcgtgagctcaatcgctttggacatctctccaagtaaaacagacgtccttgcatagaccatataaaagcggcgcaggcttttctcatcaatccatgcatcctcaaacttaagcttatgctctataatgcggcagcctctccttgcctgctcaaaatccagaaactccatgatatttgatgcttcctggatgctctgctcaaagttcatagtgatatacagctcatcatcatttgtagtttttacgttatttttaagcggtccggcactgcctatatagtatatggcgctcctgtcctcaagcgactcaactatacgatcccacacctcaacagtactgtcagtacccttgactatggcattgacacctaacacgataccgatattggcgcatggattgtcaatcagatacttgatggtctcaattgaactcttagacgccatctggaatctgtttatcacaatcatcaaaggcttcacctcagaaagcttcttgagcatgtcagctatggccatcgtcatgcgtctctgctcatatgccacctcatttaacagcactgtctcctctctgaagcactcacctgtctcataatagctgtttaacacctgtctgtgcagatagtacacaccgcactccttctggaaatcatcaaagcttccgcctataaagcgcctgtgcatattgcatatgatgtccaaaaatggctcataagctccgaccagcgtattgtaagagaactcactgtatgcaaaaaagacgttatcctcattgctttgataacgtcttataacctcaagattttcaatcgaaaaatcattgctataattcgccattacgatatttcgagtctcttttcctatgcgattgtaaatctgctcgattaccccgctataatacttctctatcatctaattaccccatcatgttccaaagccgacacagtgtatatcaatcctcctgtaatcaggcttttccgaaataatcctaaaaccatagtagaccaaaactcctaaaaagtcaatcttttgactcaataatgataaattttcctctatggatatcaatcagtgcatgatcatcgactatttcattggatatgccaagcgatgtaaacctgtcaaaggaataatcagtaacaggatacttaaagcccttaaggcttacctcattgtcgtctgtcactgctataagcgagacaaacctgccatattgggctgatttttcaatggttacgggcttatccgccatccttatacggttgtttgtgtcgataatgctgatatcagttttactttccaatcctattcccaagagtgaaatattgccgagcacatggtctattctgctgcctgttgctccaagcaccactatgcttcgtgcaccctctcttatggcaagtcttatggcatactctgtatcagtatcatcctttatgggattgagcctgtgtatctcggtctgtccctttctctcaaaaaactctaaggcctttgttgtggctgaatcgaaatcacctacaattatatcaggcgtgacaccgttttcgtacaagaaatccattccgctgtcagccgcaattatggcatctattccgtcagtctttatctcatttaagccgaattccttatctatttttccaccacatacaaccaaatacctcattttatccaccttcttataaataacatatccacatttgctacaggcccggaagcatttttgtttcaacctgcatctgttacatcatgatattcagaaaaccctttatattttcttctatatctccgctaaacaccgcacttcccgcaacaatgatattggctcctgctgcaagcagtgtctccacgttctctagattaacaccaccgtccacctcgatatcagccttatttgcggttttctcaagaagtgcctttaagtcgcgcaccttgtctacagtgtacggaataagcttttgtcctccaaagcccggatttacagtcatgataagcaccatgtccacctttggaagcacatactctatggctgagagcggagtagccggatttaatgctacacctgccagtatgcccttttcctttattgcctcgattgttctgtcaagatgcttgcatgcctccgcatggactgtgatgatgtcagcgcctgccgccgcaaaatcatctatgtatctgaccggctcatctatcatcagatgcacatcaaacatgcgctctgtgcactttctgattgtctttatgaccggcagtcctattgatatgcttggaacgaagctgccgtccataacatctatatgtacatattgtgctccggcctcatcaagctgcttaagctgctctccgagtattgaataatccgctgataaaattgatggtgataaacagttcatgttttcctccgtttgattatgctttaaattaatacttttgtctgtttttcagctcctcatacagaagcttatagttatcataccgcacctgcgatattttcccttctgaaagagcctccttgacaccgcagtccggctcatttatatgactgcagccctgaaacctgcaatacggctcatattctacaaactccggataacaggtccacagatcctccttttcaaagcccggcacatccatcgagctaaagcccggtgtatccatgatatacgtgccatcctttatcggaataatctcagaatgtctggtcgtgtgctttccgcgctctattttctcacttatgtgccctgtctccatctgcacatcatcctgcagacagttgatgatagatgacttgccaacacctgaggggcctgcaaccgtggttgtccttccctctaaaacgtgctttatctcatctataccctcgccggttttcgtgctggtaaacatcactctgtagcctgccggctcgtatatgcttttaagctcctgctgcttttggggcgtgattagatcctttttgttgaagcatatggtgaccggcacatgctggtactccatcatacacaaaaacctatcaagcaggttgaaattgggatccggctttgcggatgcaaaaataaccagggccatgtctatattggacacagccggcctgataagttcgtttttccgtggcagtatacgctcgacattgcctatgtgcttttcctcgtcgaggactgctatatcgactgtatcgcctaccagtggctttatcttttgttttctgaaggtgccttttgctttgcactcgtagagagtgccgcctgtggcagtttcttttgcttctttggtttcttctacgtagacgtagtagaagccggcaattcctttaataatttttcctgtcatggttttccttgtgtgcttttgtatttgcaggagtcacgctttcggcggggtgcatgccgcgctttgaggttgtgcgggtggcggaggcaggcatatattcctcttaaaaaatatgaagccagccccgggctctcctacggacaggctatggcttgctctgccctgttctttcctcggtaggtttatggcaccccggggcatttcatatttttccctcggaacacatgcctgccccgcttccttagtttctctccgcgagttcaggttttcgtccgcgggttggtgtggttggggttcggatagcacgccacttcgtgggtgctatccggtggctacaataaggacatatattgggttgctgctttatgcgctatatgtgtattgtgtgtatttacaaatatgatggcgatacggaaaacttgacgtagctgcgctacggctcgttttccttgtgctgccccaagctatggcaatatctacctctttttagctattccggtttataataattatttagcgtctcttatgcttatggcacgctatacgttactggatcaagtgtgacagttgcaggatttcctgcttcatctgtttcccctgtctgaactgtccaagtaaccacaatacttcctgtagcttctttcattgttccggaaactgtaaatgatgacgtattttcatatgaacccttatcgtatacagttccacttttacctacaagcttatactctgcttttactacagttccctctccactataactaattcctttacttacgttagtcgatatctcctgcttacccttactgagtgtaagtgtgattgtggtgcctgcggctacggtttcaccggatttggtctggctgattacgttgccggcgggtactgtgtcgctgtactgggagtcggcataggtgtacttgagccctgctcctgcgagggcgctttctgcatgtgactgtgaggcgcctactacgtttggcacggtgattggcttctggcccggtgagagggtgactgttactgtgctgccctttgcagccttgttctttgctgatggtgactgtgctgttactacatctgctgctacactgtcattgtaatctccatactcgaaggtgacactaaagcctgctgattcgagtgtactctttgctgagctcttggtctttccgattacacttggtaccttgaccatctcagatgtgctatcaccttttcctgcgataactacattaatctgtgaaccacgctttactgtatctccggccttgacatcctgctcaaggattgtgccatccttttcatctgactgctttgtctcaaatgcaaatactgtgaggtcaagctttaagcggtctactgccttctgagcatcctccactgacatgcctctgatgtcaatcatctggccctctgtctcagtctgtgtctctgactctgattcagactcggtctgtgtctgtgactctgtctgctgtgactctgagttctttttgccgccaaacttaaacactcctgccactgaaagtgcaagatatatgataactattacaatgattacggctgttactatacccatgattgtgattgctttatccatctttggatttaaaagcttgccgtcatcatcatcgtcttcgtcttcttcgtcatcatcgtcgtctaagagtgactcatcatattcatcatcatcgtcttcatcgtcagcatactcatcaccattatctgcatcggtatcatcatcgtttaagtcctctgcaacacctctgccttcttttatcttgtcaagctcctccgggcttataaccttggtcttgccaccgtcaacgagtggtgctattgtaacgaaatcctcatcaggatgcgcaagagagcgccttatgtctgtgagaagctcctcaatagtctggtatctgcggtccggtgtcttttgtgtacactttaagatgattttctcaaagctgattggcagatccggtgcgtagatgcttggccttgcaatctcctcctgtaggtgctgcagtgcaactgccactgtggtatcaccgtcaaacggcacacggcctgtaaccatctcaaacattacgattcccagtgagtaaatatcacttctgccatcgacgaagccgtttcttgcctgctccggagatgcatagtgtactgagcccatcacatctgagcttattgtatttgaagatgtagcctttgcaattccaaagtctgtcacctttaccttgccatctgtagaaataatgatattctgcggcttgatatcacggtgaatgatatttttattgtgagcggcctctatgccccttgccacctggattgcaatacttgcagactccttgaatgacagctggccctttttctcgatataagtcttaagtgtgataccctcgacatactccatgacaatgtagtacagaccattctcgctgcctacatcatagatatttacgatatttggatgctcaagtcctgctgctgactgtgcctcagcacggaacttggtcacaaatgaactatcctccgaaaactcctgctttaaaacctttatagctacaaaacggctcagtatatggtcttttgccttgtatacatcagacatgccgcctgcgccaaccttgcttaggatctcatatcgatccgataaaaaacttcctatctctaacatctgttattacctcgtcttaaaatggtttaataatcattacagtgatattatcgcggccaccgtttgcattggccatggcgacaagctgtgacgctgctgtctcgatattatcattttgcctaatagtatcgcatatttctttatctctcaccatattggtaagtccgtctgtacacagaagaatcctgtcgtcctcacatagctcgacctcaaagaaatctgcctccacatgatctgctgccccgacagctctcgtgatgatattcttgtccggatgaactctcgcctcgtcggcatttatctcacccatcctgaccatctcatcaaccagtgaatgatccctggtaatttgtctgatctgctctgtgccacctacaatataaagcctgctgtcacctatattggccacaaaaagcttgtttcctataatagttcctacgactaaggtggtacccattccacgcttagcttcatcctcacgagactcagccaccaaaagctcatttgccttgttgatagcctctttgatgatggataccggttcatccccggcatttctcgataccgatgcaaccacacgctctatagtgtatctggaagcatagtcaccggctttgtgtcctcccattccatctgctacgatgaaaagattcggaagatttcctactgcagtgtcagacgagaaataaaaatcctgattcatctcacgaatagcacctgcatccgtaatggaaaacgtcttcatctagtttattcctctctctttatctatatgcttcttgcgaagctgtccacaggcaccgtctatatctctgcccatttcccttctaatagtaacattaattccgtttttttcaagcctatttttaaaagcctctataacacccttgttggactgcacgtagtcgcgctcctttatcgggtttaccggaatcagatttatatggcagttcatgccatgcacgagtgccgaaagctctgttgcatcctcggctgtatcgttcactccgcctaccaggctatactcaaaggtgactctgcggccggtctgtgcaaaataatatttgcatgcatcgaccacatcatgtatatcatagctgtttgcaaccggcatgagagcttttctcttttcctggttggaggcatgcagtgaaagcgccagcgtgatagaaagcttttcatctgcaagctgtctcatgcgcggtacgagaccacatgtggaaactgtcagattgcgctggctgatattgataccgttttcatcagtaagaagctctataaagcgcagcagattgtcgtaattgtcaagcggctcgcctgtgcccatgacaactacatttgagatgcgctctcctatgtccttacctatctgataaatctggtcaatcatctcagacggcctaagccccctgacgagaccatcaagagtggatgcacagaatctgcaccccatcctgcagccaacctgcgaagatatgcatacagagtttccatgcttgtacttcataagcacactctctatgacattgccatcatcgagtgcaaagagatattttctcgtgccgtcgagctttgacacctgcacctcctctttttttagcgagatgagtattgcattgtcctttaatacctgtatgaacttttttgaaatattggtcatctcatcaaagctgtccacatgcttcacatgaatccactcatatatctgcttcgcacggaatttcttctctccgagcgatatgataaactctgtgagctcgtccatattcattgatttgatgtcagttagttgttcttttatctgttccatatcatttttattaagtctgcatttaactattgttttataaatgttttttcttatttgttttgcttattgtttattacttcactaattatatcctgaaatctggtttcgtaattaaaattcatcatttaaatctgcataaacaaattcttctaattcgaaccaatttatatttattaattcatgatttattttaatatcataatttgctttttatgaatcttgcaataaagaatccgtcacttccatgctcaccgggcagtatctgtttcattccggtgccctcagcaaagctcttatccagctcaaactccggatgcttttcaataaaccacctcacattgtcctcattctcagcctcatctatcgtacatgtactgtacacgagcactccgtttggcttcacgtatgtatgcacggtatcaagtatctgtctttgaagaacgacaagctcatctacagactcaggtgtcatcttgtagcggatgtccttctttctgccgagcactccaagccctgagcacggcagatcacagatcagtatatctgcctttcccgccgaatcagcatcaaatactgtggcatcccacacctctgccgacatattgttaagaccatgcctgtctatattttcctcaatcatatcgaccttgttatcggtcaggtcacgcgcgaacacatggccgcttccctgcaaaagctcagctatatgggtgctcttgccgcccggtgctgcgcatacatctatcacatagtcgcccttctttggagcagccgtctgtgcgacaagcattgagcttatatcctgcacatagaaaagtccgtctctgaagctctgcaagccattcaaataatcaaatccagatataacaaatgcataattaagttcatcaaccgctgtgaccgtcacaccctctgcctcaagcgtcgcgcgaagctcatccggagtacacctggtcaggtttgtcctgatgctaattgtgctcttattgtgaaaggccttgaaaatctcctctgccttcttctctccgtatgccgcaacaaatctgtccactatccactgtggcatagagtatcggatgcttaaggtatcaaactgtactgaatctatatttcttgcaatatttctgagtacaccgtttacaaagcccgaaagctgtgcaaacttatgcctctttgcaagcttcaccgcctcattgcatacggccgaatccggcaccgcgtccatgtactttatctggtaaacgctcatgcgaagaaggtttctgatgaagggcttcatcttccttacctttgtctttgaaaaagagtctatgatgtagtcaagctgcagcatatactcgatagtgccgtcaacaagcctcgtcataaaggctctgtcctgctttgacagatactgatacttgtcaagcacactacgaagcacgatatgtgaaaatgctccacgctcattaatctcaataagcatctcaagggcaagctcacgcgtatctacagagtgctcattatgcgctgtcacgtttgattttgccggtctgcccggtatattatttttgtttatttggctatttttattattatgattatttttactatgattatttatcatgatgatgtttccgaatagttacatatacatttaattttctaactaatatatccaatttgaactgccaccctgtaaaatcacaggcaaacagcagctaaaacaatatcagtcgtcccgtctgcgtccgtttgtgataagtattatacgaaggagctgtaaaatagcagccgccgcactggctacataggtaagtgccgctgacttgagcacccttcttgtgtacctaagctcgtcatctgcaagtatgccctgtgtacgaagcatgacaagcgcacgtcttgaagcatcaaactctaccggcaatgtcacgagctggaaaagcactgctgccgaaaacagcaatatgcctatatcaataataagccctgacgagcgtgtgttaaataataagccgataagtatgaccggccatgcaagcattgagccaaaattagctataggcacaagtgcactcctgattgaaagaggtgcatagctttttgcatgctgtatagcgtgtccacactcatgggctgctacgccaagtgctgcgaccgatgtggcattgtacacaggatcagataaattcactgttttggtgcgcggatcgtagtggtccgtcagactgccggacacatgacgcacctgcacatcatatatgcctgccgcctgaagcactctctgagccacctgcgcaccattcatgcctgacatgcttcttagctgtgagtatttattaaatgtacctttaactcttgccgatgcaatcatacatatcactgcacctatcacaacgagtatatatgtcggatcccagtaataatatcccatgtatcatctctgctactaaaaacatatacaaatgtgtatatgctagatgattcgctacaatctcacgatttgtagttactgcttcaatgtgtatgctttggcgattataaacaatacgctactcacaagttcttgtacactccacagtcgtaaattcccgactaagccatcggtacatacctataaattctttaaattgattagatataggttttcatctaaatagcttttcctttcttaatattttatgtttcgctacttggttttcgtaggcttctaccattgtctaaacgctaccatcaaggttctatcctataattagcaagactgtttcaacttgcactggctacttctcaacgtttccgactgctttgacgttagcacaaacgaatactctggattttgagtatctttgagaacattgactcacatttaattatgtttttagttacttataatgaataactataacgtgaaaaatgagccctcttccacatgacagcctctcaaaaatgaacctgtatccatgcgcttcttgccctggagctgtacctctactaaagataatgctccttttcctgtctgtacatacatatcattttttccgatatgataaatacagcccggctcataatcatcgctgccgtcaatcacctttgcactccacaccttaaatgtcttaccattcaggtgggtgtatgcgctcggccatggattaagcccccttataagcctctcaatctcaacagccggctttgtccagtcgataaagccaagctccttactgatcattgatgtatgtgtagcctcctcgctgttttgaggagtatactctgcagtgccatcctctatcatcttcatggtctccacacacagccttgctccctctgctgagagcttatcaaacaggctgccgccggtctcatcaggtgcaagtctgactgtactctttgcaatcatatcgccggtatcgacgccctcatccatcctcatggtagtgacacctgtaaactcgtcaccgttaatcacagcccactggataggagccgcacctctgtactttggcaaaagtgaagcatgcacattgatacagccgtatcgaggcatatcaagaatactctttgacagaatctgtccaaaagcaaccacaattattatatctgcattaaactttctgagatactctatattagcagtctctcttattttaaccggctggaatacctcaataccgtgcgaaagcgcacactccttgaccggtgtatactgcattgtcttgccgcggccctttggcttgtcgggctgtgtgacaaccagtgccacctcgtgccctgcctctataattgcctcaagcgttcccaccgaaaagtccggtgttcccatgaaaattactctcatcttactgcctcccagatattttccaagctcagataacaaatgtcatcctaatgattactcctgtgtatcctcatatgtcacatcgtgaagtgcgccctcaaccttctccacatagagatgtccgtcgagatggtcaagctcgtggcagatacatctggccaaaagctcttctccctctatctcatactcattcatatcctcgcccatgaaacgagcctttacataattcgggcgggtcacctgtccggcctttcccggtactgaaagacagccctcatcgccggtctgctctccgtcagactcgataatttcaggattaatcatcacgattggaccctcgcccacatcgataacaactatcctctttaatatgccaacctgtggtgcggcaagtcctacaccattagcctcatacatagtctcaagcatatcatcaataagtgttactatctttggagtcacctccgtaacctctctgcagaccttgccaagtacagggtctccctccactctaatagttctaagtgccataattgcctccttctatatctatcaaaatccactcatcggattgaaatcaaatgagatattagcatgtttcattgccgtatcagctttcacagcctgctctatgccatcctttatggaaatgagcgccgcatagtcagatgtcttcatgtaaatcaccttgcggtatatgtcatttaccttggcgatggtcgcatccgcaggaccgatgagctgaatcagatgcctatcatccgggctctgattttcatctgtatgcgatatcatctgcgctgctatatcgtacactctctgcgccatgctgccacactcactctcatcaggtgatgtaacatggactaaaagcatattccatacaggcggatagttcataagcctcctgtactctatctccttatcataaaaagcctcataatcctgctcttttgcagtccggatggcatagtggtcagggtcgtaggtctggataaccacattgccgggcagctttcctctgccggcgcgccctgccgcctgggtcagcagcgcaaatgtgcgctccgccgcatgaaaatcattcacatgcagtgacatatccgccgccagcacaccaaccagcgtgacatttgaaaaatcatgcccctttacaatcatctgcgtaccgataagtatatcggcctcatgattggaaaatgcctgcagaatcttctcatacgcatccttcgccctcgtggtgtcataatccatgcgcagtatacgcgcctgtggaaaacgctttgccaccatcgcttctatcttctgtgtgccggccttaaagccgctaatgtacttcgagccacagctcggacacaccttaggcaccggctgtctgtagccgcagtagtgacagaccatcactccgccgctatgctcactgagtgatacatcgcaatgaggacattttaccacaaaaccgcacgctctgcacgacataaatgccgatttgccccttctatttaaaaaaagcatggtctgctggccatttagaagccgctcctccataagctcctgaagcctggtggaaagaatcgagcggtttccctcacgaagctcctgcctcaaatcgacaacctcacactttggaagaggtctgtcgtccacacgcttatccagctccaaaagcctgtaaacgcctgtctttgccttgtaatagctatccaccgacggtgttgcagagccaagtaccacaatagcatcggacatgcgcgcgtactctatcgccacctccctggcatgatagcgtggcaccgactcgctcttgtatgaattctcgtgctcttcatctattatgataagtcctaaatttgaaaaaggtgtgaacagcgccgaccgcgggccaatcatgatgtcaatatcaccattcttagctctctcaaactggtcataacgctcaccatttgaaagtcttgaattgattatcgaaaccctgttcccaaatcttgcaaaaaaacgcatcacggtctggtaagtgagggcaatctctggaatcagcacaatcgcctgacgcccggactgtatacagtgtgcgataagctccatgtacacctctgtcttgccgcttccggtgacacccttaatcagataagtatttctaagaccagcggcaatgtcaccttctatcgcatcgaccacactctgctgcgcagcattcagtaccttatcataggtgtccacactcatatgctccacaggatttctgtagccgctctgtgtgattacctcgataaagccactctgctcaagcgctcttatagtggcagccgacaccgacagcttgcctgtcacaaaggaatactcaaggcgtgccccatcatcagcatcaatcagcgcacgaaaaagcctggcctttgccttttgtttttttgcctcgcaaagcgcaagctgcgcccttgcctttatcttgtctattttcagtgcaatacttcggctcacctgctccttagcctgcttctttacaggtataacagtcttaagcgcctgattcatggtagagccgtaattgcgccgtatccatgccgcaagtgcgatgagctttgcctccacagccacagagtctgcctttatcccgataagaggctttgtccttgccgggtcgtactcaggcttatccgtgacctcaatcacatagcctgtgatagtgcggctgccaaatggaatatccacgcacacacccggacggatgtcgcataaaatctcatccgggatgctgtactgaaatgtcttatccagtttttcgtgggatatatccacaatcacgttggcatacataactgatactatttaactccttcgtatttctcctcgcagtacttgcagcggtagatttcgtttttctcatcggaaagcacgaaaatctggtcaagctcctgctcaattgaagtgatgcatcttggatttttgcacttgatgacatttttaacctgatgaggcagcttaagctccatcttgtccacaatcttgtcaccctttatcacatttacagtgatattgtggtcgataaatccaaggatatcgaggtctaacgactctatcggacactctaccttgatgatatccttcttgcccatcttgctgctctttgcattctttatgattgcaactgtgcagtcgagcttgtcaagctttaaatccctgtaaatctgaagactcatacctgccttgatatgatcgagcacaaagccctcatgtattccactaatattcagcatattatcctcctttagtcctcagccaatccaagcaatgtcagaataagcgccatacgcacgtaaaccgcatactgtgcctgcctgaaatagcatgctctcgggtcatcatccacatcaacagaaatctcattcacacgtgggagcggatgaagtacaatcatatcatcctttgcaagctccatcttctcctttgtcagaatgtagaaatccttcagacgcacatagtcctcctcattgaagaaacgctccttctggacacgtgtcatgtagagcacatcaagctctcccatggcatcctcgagcttttctacctccttgaactcgatattgttggcacgaagcacatcatcgcgcacatagtcaggcaccttaagctcctctggcgagataagcacaatcttcacattgtcatatctgataagtgcattgatcagtgaatgcactgtacgtccaaactttaaatctccgcaaaagccgattgtgatattattcaatctgcccttgatggaacggattgtaaggagatcagcaagtgtctgggtaggatgctgatgacctccatcgcctgcattaattacagggatacgcgatttctctgaagccacaagcggtgcaccctccttaggatgacgcatggcacagatatccgcatagcaggaaataaccctgatagtatctgaaacgctctcgccctttgacgcagatgacgaatcagcactgtggaaacctaacaccgagcctcccaaattaagcatggcagcctcaaagctaagcctggttctcgtgcttggctcataaaaacaggttgcaagcttctttccatcgcacttgtgtgcatatttctcaggatgagcctctatatcatttgcaagatccagaagcttgtccaactcttctacagaaaaatccaacggactcattaagtgacgcataatttgcctccattctttttcgcgtaacaatttttattacattttttctatcatataataacttagcgcaatattcaagttggcttttacacttttttgttgtagaatatatgacagaatataactgttctgaacgtttagcaattgtattgaagttttcatacaattacgacaatttcaacatcaaaaaggagaataatatgtctgtaaatgaatcacaaatcaaaaacaccacagccggcgcaatcgatgatgacgatgctgtaatctttaaggagagaaagagactgctgtttctcggtctgccgtggactttcacaaaatataccgtcacaccgtcctttatcactgtagagtccggactcttaagcaccacagaggatgactgctacatgtataaggtagctgatgtaaagctcaccacatcactgatggagcgcatttttaagctcggcaccatagtctgctacacaggcgacgtcacaaaccctgagcttaagctcgttcacgtaaagcactcacgcgagataaagagctatctgctcaagcagtctgaggccgcaagacttaaaagacgcaccttaaacactgtggatatcggtgcgcacggagcagacatggcagatttggatcatgatggtattccggattcgctggaataatacagccgttgctgcgcagctgattttgctcatatatgtgtggatctgaatagttacttatgtccataaataaaaggggatgtgaaaaaaatcaatcgagttttttcacatccccttttatttttcaggtaactattcagaataattcacagattaatatagccgtccatcgttcttcaaataaccagcccaataatttgcatgaatttccatctgtaacatcagaaaagcttgacatctagcagcagaacatctgccagcaaaggaatgtggctagcaggctgcagcactcgctgcccctgccactagggcgtccgtatatgtctcccatatccgaataccacgagccaccattttcaattatctgcataaactggcggtactgcatgttgtttggctcaagcgacactgctcgctgtatgtgttctatggctgtcgctgtgttgccgagcttttggtttgcgatagcactgtagtagtaccaccttccgcgtctctcagcaaaaggtacctcctcaagcaccttcagtgcctcattgtagtagccgttgctgatgaaattgcctgctgcacgcacctttggattgtcatcctgtgcactgctgcctgcattattgtaggtatagcggccatagaaaccaccaaacggtccacctgctccaaatggatcacctgctcccggtccactaccatatgctccaccataggagctgccgccgtatgagctgctgcttcccgcaccgccatatccaccggttccggcagcaccggactgcttttccttcattatctggtcatatgcctgctgcacctgcttaaacttctcctcagcctgatccttgttaggattgttgatattggcatcaggatgatattttctgcttaagctcctgtaggccttttttatttcatcgtcacttgcactgcggctgacaccgagcacctgatatggatctatcatttatgtttcttccttttcttcatctgaatatactcatacttgctccacacaccggagtatagaacatttctgattatatccgcatgtaagagaattggcaacctctcaaatatttttgctgcctctgaaagcatagatgtcatcataagccgacaggatttgtcaaatttttcctgatcattattgcagcaatgcatgagctgtataagtggattatatgacttctttttcacatcatccccaatatcctcatacgcatccattatataaataaatttgcccatatagcagccaaattccttcagatccttctgccactcatcctgcttccacgcaaaaagtatgccgagcatctctcctgtcagccccgcaactgcatcaatattggtatcattgctcttctcgcactctgcaagccttgcaatgtagtcttctatcgccttagcctgtatcggatagcctttttttgccttctcaaagtcctttttcagcatctctgcgtatgtcttcttcgtcaggctcttgtcatccttccagtcatctatcagattgtagtatgcaagcagtatgttcatagctgcagcatactctgtaatctcattggtgcgaagtgtacgcttcttcgtagggtgcacgctgcatacaaatccatcccgcgtcacactatccggctcatacaagcctgtcagaagcactatgagaaaagtcatgtcatagtttagtgccatctgtgcacgcctgccatactgcgacttcattgtctggcacagcccgcaataatagctttgatatatttttttattttcctcggacaaggtgtccttattgacagttatatatccaaacatttctcttctccatgctcttatgtacaggtatatatattgacataccagtacatcgaaaaataagtttctggctatatgacgcagaatgaattttcatctgcaaggcggaggaatgaggcgtagcggtggctacgtcgattgactacaacgccgcagatgggaaatcaggcaagtcatatggctggttacttattattcgatgtactagctgcgtctcacgaactgctcccggcacttcggacaggtaatacagatcttgccatgtcctcttggcaccctgacctcctgcttgcacatagggcacttgaagaacttgtactgcttcctctgtgcaaagcgctttttcctgcgctctgcctttacggtccactcatacctggcatttaaaaacttctgattctctgcatagcgcttgtttacatttctcgaaaatacacgaaaatacatatgtatcatcagtcctatagccagtatatcaagtatcgccgaccttgtaaatattgaaaccacaagtaatatcattactacccatgactcagcccttgcaagctcgtccatcccgtttcttccattcataaatctgataaatttttctctcatattaccgcctcgccctatattttcattatagccaaattcttacctcatacagtgtccacgctatgaatttgaggttttaaatcgttctttacatttattaagataatattgaagataaaaaccgtcaatagacctatcgtcttttaagaaacattttatatttcgtttattaaagttggtaaaagggcttgatttttggaaaaatgcttggtatattaaataaatatgcaggacaggtgatcgcggctgcaggtgtcgaaagaccgcaggtgaggaaagtccgggcttcatagggcaggatgccggttaacggccggtggaggaaactctaaggacagtgcaacagaaatataccgccacttttgtggtaagggtggaatggcagtgtaagagactaccgcctcactggtaacagggagggcacatgtaaaccccatccgaagcaagaccgaaacaaagctttgacgtggcccgccagctttaggtaggttgcttgaggcgtctggcaacaggcgtcctagatagatgatcactcaacgacataacccggcttatcgtcctgcgtattttaataatctaaagcctattggcgtttcgtaaaataacttattagtaacgtgcgccgcaaggtgcaccattaaaaatgcaactgagatatctcagttgcattttgttatttcccggtaactatcatttgctgttgtatatgatgcagtctaccggtaattattatttgctgttgtatgtaataaagtctaccgtcatctctatctgctcctcgaaagccacatcaggtgtaccgtcccctttttgcagaccatagcttccaaaataagaatggcacccgccatcaatgacatactcatatgtatcctccggcaggtttgagcggtatttgcggtatttgtccatatcaagcacaccatcctctgaaccgtacacgctaaaaaccctcagatctgaatccgacaggtcagcggtagaatatgctgcaaaaagatatagtccgtcaaactcatcaacatgctttgacacatattctgcagccatggctccgcctaaggagtggcctcccatgtaccattcctgtatggatgggtatatttccttgtatttttcaatgataccgtctgctgcattctggtccaatactgcgaggttgcccggcatatgtacaagtatgcacacgaaattattctttgtaagctcatgcatcagcggcgcatacgccgtatactgtaccctgcctcccggataaaaaatcaatgcctttgtggctttttccttatcctgcggtgcaaaggttatcgtataattcttaagctttaagtcgtactgggtggcctgtatacgcttgtccttcttttcaatagtaacagaaacctctctgtctgaatcgattgcagcctccgcaattgaatctgcccgataataatttcccacataacaatttacggcaataccgccaattgccatgactgcaattgcaacaagcagtattctatacacagccggaatgcgggattttttagttttatacattaaagcagcttcctcctacaaactcacgaagcagtgaattgtttggtatgccgtcagccggcatcggaagaaagtagtctaagagtttaagcagcctctttgcctcgagatactccgggcagtctctttctatgccaaaaagcaacggctccgcatacaccttgagtaccgcaagctcatacacaagtgcagagttgaacatcacatccgcctgttcctggaaaggaaagatattctccctttcaccctttctgacagacggccacatagcgatggtctccatggcattggtacctcgtgtacgcgcatcacgcacaatccggcgtataagtctttcatctgtggtggaaagaggattgtgctcgtcaatattgagctgtgtaagcgctgatatatagattttgaacttgtgctcaggcgggataagctgtgaaagcctgtcatttagtccgtggattccttctatgacaagtatatcatcagctcccagcgtcagctttcttccgcggtactctctctttcctgtcttgaaattgaaggaaggcatatcaacagcctctcctttaagaagcctgttcatatcctcattgaacagctttacatcaatagattcaaggcactcaaaatcaaagcttccgtccggatgcttcgggcaaagctccctgtccacatagtagtcatccagacttaacggatgtggctttctgccctttgcgataagctggattgacagtctattggcaaacgatgtcttgcctgatgatgaaggacctgctatcataacaaatttctttttgtcatccaaagcaatctgcgctgcaagatttcctatcttctgctccatcagtgcctcctgaagcagcatgatttcctgtcccctgcctgctgcaatcgcatcattcagtgagcctatcgtgcctattccaagcatcttgctccattccctggaatcatcaagcgtgtgaaacagcttatttgatgtcacaagcggctcaacactcctgctgtgagcacccggaaaaagaagcacgaagccactctcatacggcactatatcaaagtatttgagcatgcctgtcgagggtgccataaatccgtagaaataatccacaacaccatccagctcatagagattgactctggagcttctcctgtagtgcaatagcctctccttatcatgcagccctttttccttgaaaagctgctccgcatactgtgtttttgcactgtgcttggtaatcgtgaggtctttttccacaaatgtgtacatgctgcatactatcctgtcgatatcatgctctgtcacgcttttctcactgttttctctgctgccttggtctgtatcttcattatatttttcctgttggctgtccgcacactccactgctttctcaagctgacaataatagccttctccgagcgaatgcatcacatgaagctgtgtcatactgccatatacatcgtatatagccctctgcaaaagcagcacaacacttcttctgtatgtacgcctgccatccctgtcagctgtcgtcacgaagctaagctcacagtcactttttattttcttattcagttcacgaagcctgccgtttacaattccaaggattatgtcatcctcataataatccttgaatctgtctgctacggcttctaaagtatcactttctgatgctgtcactgccatgacctgtccatccggcaaggtcaccttcacactatattcctgcatttcttattgcccccatagtcgaatatgctgcctcattgtatgccatcatctcgtttatctgctcgattctgtccatgatggaatcactcatctcctgtgtccttagctgctgcatgatggcagccagcttgtggtgttccctgacaaggaacttcctaagcaccggattaccgtttttgataagtaccggtccgtacaaatcgcatacagtaaccgtcgtctcgtccatattgtcccatgcggaattgtccgcacacggcacacatctgaacatcggatagtattttccgtcctccaaaatcatatcctcatcaactatcttatagcctgtgttccttacatattcacggactttgctcacttccgactgtggctgcagaatcagctcctttgccgacctgcacactgtctcccctgcggttaaaatgtgaataacaagctctcctcccattcctgctatgacaatagagtcaacctctccgtcgtgtatcgcttcaagcccattggaaagccttgtggtaatctgctctgtcagaccgtttgcccttatatgctcattggcgcgttcaagcggtcccttatttatatcaacagcaattgctttcggtattatattcccctgcaccagggcaataggcacatagccatggtcggttcccacatcacacagcgtgtagccggccgtgaccattgatgccactgccttcattcttctggatagcctaatcatcttactctaagtagtccttaagctttctacttctgcttggatgacgaagctttcttagcgcctttgcctcaatctgacggatacgctcacgagtgacgttgaactccttacctacttcttcaagtgttctggctctgccgtcctctaagccaaagcggagtgtgagtaccttctgctctctctctgtaagagttccaagcacctcctcaagctgctccttaagaagtgtgaatgctgccgcatcagcaggaaccggtacattatcatccttgatgaaatcaccaagatgtgaatcctcctcctcaccgattggagtctcaagtgaaacaggctcctgcgatatcttgagtatctcacgcacacgctctaccggcatgttcatctccttggcaatttcctccggtgaaggctctctgccaagctcctgaaggagctgtcttgacacacggatgagcttgttgattgtctcaaccatatgcacaggaatacggattgttctggcctgatcagctatggctcttgtgatagcctggcgaatccaccatgtggcatatgtagagaatttgtagcccttcttgtagtcgaacttctcaactgccttgataagacctaagtttccctcctgaatcaggtcaaggaaaagcattcctcttcccacatatctctttgcgatgctgacaacaagacgcaggtttgcttctgcaagacgctttttggcatctgctcccttgtccacatccctctgcagtgtctttatttcttcctttatctcagccttttcctcttccgatgcaccatcaatgcggccctttagtacattaatcttctcggttgctaccgctccgtcctccatattctgggcgagctcaatctcctcatctgctgagagaagaggtaccttacctatttccttaagatacatacggacaggatcctcgacgctgactccctccggtactgagagatcaatcttttcaacctctacctcgtcctcatcatcgagtatgatatcatcatccacgtcatcatcattgctgattttaagcacgtctatgccgttttgctcgagataatcaattaccatctcaaacttctccggatccagatttaagtccttgaaaaaatctgcaatttcctgatattcgagcatattctttttcttttttccaagctcaagaatctcaataagcttctgctggaaattcagtctctgctcctgctcctgtgccatgtctttttgttcctttttctttgccattttattttcctctttattctggtattttttgcaattcttcgagtgcacgcttatcctcaataatcctcatcatgccctccatatctgtaggtgccagatgctttgagcggtagtctatgctgttttgcttgatacggacaacggtttccctgagtgcggttgccttgtcatttttcccctccacctgatggattgtggcattgaaaagccctgccacctcgcgctgttcgtcctcatcggtaaacatgcttactatcctggccggatttactgtatgcgtggtctcgtactgtgaaaaaacctccttagccaccttgtggtacagctcttcggtaaagtcatctgcactgatacgcccctttatcctgtcaaaaagtgaattatcctctatgagccatgtgaggagaagcttctgcgactgcttcatgccatcctcctttttatttttctcattgattccacttttaagctttgtctggggctttacgataccgcccttcattgccatactgtttacgagctttcttaagtcgtcgtatggtatgctgtactctcttgacactgcctgcgtatagtttgtccgctcaagctcctcggtaaaaccaagcagcttctttgcgatttcattataaaatgcggtttttgactcgggatcgtccatatcatagcctgcctgcatgatccgtatctgaaacataaagctgttttcagcctttttgatacgttcctcatactcctgtgcgccaagcgccttgataaactcatccgggtccttgtacggccgcatgttaatgacctttgttgtgatgcctacctccttgagtatcggaatcgcacgcagcgctgcctttaccccggcgccatcactgtcatatgtcagatacacctcattggtgtatctctttaatagtgaggcatgtccgctcgtgagcgccgtgccaagcgacgccaccgcattgtcaaagcccgcctgatgcagtgctatgacatccatgtagccctcacacaaaaggagctggtttttcctcgtgctccttgctatattaagtccgtaaagattacggctcttatcaaatatctttgtctccggagagtttaaatactttggctctccgtcacccatcacccggcctccaaagcctatgacacggttgtgcacatccataatcggaaacatcgcacgattccagaacttatcgtgcccgcctctgacctcatctatcgtcacaagacctgtctccttaagtatctcatcatcatagcccttgctgcgcagatacttgtacagatcatcactgtactggtccgagtaaccaagcccgaacttctgcattgtctcatcggacagctctctctttttgaaatactcatgcgccctttgtcctctcggtccacgaagcagcatataaaaatacttcgcagcctctttatttatctcaagcagctgtgtacgcctgtctgcctccctcctttgtgctgaggtcatctcctgcttgggaagctcaattcccacacggtctgcaagctcctgcatggcctcagggaaggtaaagttctcatactgcatgagaaatgtaaatacattgcctccggctccacagccgaagcaatagtacatctgcttattcggtgagacggaaaaggatcctgtcttttcgttatggaatgggcataatccaaaataggtacttccctttttctgaagatgcacgtagcttcctataacatcgactatgtcatttcgcgaacgtacctcctctataagctcgtcagagtagtacggcattttatcatccccttactgttcatctttgttgtcatttgtgtcgcccggcgagcgcgtctgcagtgtggcacttagctcttacacccggctaacgctacgctgctaaaagtctgtacgaattatcagtaaccatctatttcccaggctaccggtacgaaatactcgtggaacttcgttgtggcatactggtctgtcatgcctgatatatagtcgcatatgatgcgccccttgtcatcaccctgccctagcatgacgagatacttctgcggcagctcctctatatgctccatataatagaaataaagctgcttgagcatcgccttggcctttttctcctcgctttttgcaactggattgttatagaggtttgcgaacatgaatttacgcaaatcctgcattgcctgcgcggactcttttgacatgcatatatcgtcctttcccatgctgtttgtgatgatattgtgcaccatatgattgagcctggccttggtgctgtgtccaagcgtgtttcttatctcaagcggtatatcatcctcgcacagaagctgtgcgcggattgcatcatcaaagtctgaatttatgtaggctatcttgtctgaaagcctgactattttgccctctaaggtgtgtggcatgagcgaggtctggtgatttagcataccatctctgacctcccaggtcagattgagtcctgctccgtccttttcgagcttctccactatgcgcacactctgctcattatgcttaaagccaccctcgtaaatctcattgaggatgcgctcacccgcatgtccaaacggtgtatgccccaggtcgtgtcccagcgctatagcctccaccagatcctcattcagtctcagtgccttggctattgtcctggcattctgcgacacctcaagcgtatgcgacatacgtgtgcggtaatggtcgccctttggcgtaagaaacacctgtgtcttatttttcagacgcctgaatgccttgctatgcagtatccggtccctgtcccgctgaaaaacaggcctgatatcgcactgcggctcatcatagtccctgcctcttgagttgatgctcaggcatgcgaacggactaagtatttcctgctcacgtttttctatctgctcgcgaatagtcatttatctgcctcctcgctgtcacagtcgttatgttctgctgctattcacacacaaatgtaacaaatagcgttacattccactaattatgctctacactagttattattcgacgtgatttttaaaaatcctttttttatttcttattactttaattttctttcggcaaaaattaaatgctatatcaattaccgccgagcacatggcgcagcatctgaagctgtccgcctgtgatttcattgtcgtaactgccatagtaaaatttatcgtcttttgccagtatgcagcccacccaggtgcccacatgactgtcactctctatggcatccttcatggatttgtagccctctattgtaaaataggcatcatagcccttgaagtctgccggatttattttcactgcaccaaaggtatcctcaagactttttatgaaatcctcatcgcactccgtatagcctgtgacatccttgctgtagcgcgactctgactgccactcctcatcccacatgagaaaaacgctgcagtccttccatgaattgcttttttcaactacagacagcttcttgtaggaatttgatgcgttgcccgccatctgtaaatatgtatcgtcaccgttcttattcatgtataagaggtttgaagctgcaagctcatagtacctgctgccatagtcctgatccttgtatacaatatagccaagcggactgccggtccctgcatagtcaagctctatggttatcggaatatacacctgactgtcataaaccataggcccaagcctgtcatcatttgtgatacagcttgcaaccttttcatactcagccggctcgtttgaaggcgacatgaaatatgtgtaaacaacaataattgcaatgacaacgaccggcacaatgactattacagcttttaatgttttccttcgaaccctgcgtctgtgaatgcgcactttcctgtctgcatgctcatcgcaatacctgtatttcaccagtctgtatacaacgaaaagctccatcacaagcaaaaacacagcaaaggccatcatacagccggcctgccacatcaccttgtgattgacaaatttcttatctataaacctaagcggtatgagtattatcgtccaaaaaagcgtatttcccaacacataccgtgaatatattttcctgctttttattacggtaagcggaaaaagtgaaacaatcactgtcagcatgagcacaattgcaaaaaaatatccccatatctctgacagggttgagccgtacagtgccttgaaatactgcgccggaccaagctttttgatatttccccagcctgagtattttgagataaaaagcactactgtgccgataaaccatgtcagtataaagatgcccatgtagcatgccatatttttccttgcaaagctgccatatctcataatggaatatgacacaagcacccctgcaagcacgggaaatccgccaactctgccaatcaaaagatttacatactccataacagcaaaagacaaaacaaacacacatattacattaatataagatagattcaatctcttcacgctgcaatcccatctccaatataataatcaaattcctgtgacagctgtacccctcagtgtggcagtcaacggttacagaccattaatagccaataggctttcaaaattatctgcacaaaataaaataggaagccgttcaccgacttccctgttaatgcaggagatgggacttgaacccacacgatattgctaccacaggcacctgaagcctgcgcgtctgccaattccgccactcctgcgaacaaacattattctaccaaaaagtttagaataatgcaagcataaatttaaaaaactatacgaaatgtacgaaaaactataaatctgttactacaccagctttgatatatctaaaaccagtgcatcaacctcctcctgttttgtagcccagctggtgcagaatcgtactacagtgccatccttcgttctttccatctcttcaaaatagtatttctcggcaagtgtcttcttctgctcatccgataaaatcacaaactgctgatttgtaaagctctcaacccaaaacggtacctttttctgttcaaatgcctctttaatctgcatggcaagctcatcagcacgctttgtcttttcaaaataatcgccattctcaagcatagtggcaaactgtaaacccatcagccagccctttgcaagcactgcaccgttttgcttcatataagccttaaaacgatacttgatatcctcagcatttataaccagcgcttcgccaaagagcgcaccacactttgtgccaccgatataaaaaacatccgaaagcatggcaaaatcacaaagtgtaaggtcatttttatctgagcccagtccataacccattctcgcaccatcaacaaacaggtacatgccatatttcttgcagacagcactgatatcgcaaagctctcttttcgtgtaaagagtaccctgctcagtcggaaatgaaatataaaccatctttggctctgtcagatactcaggcttggcattgtcataatactctgcggcacacgcctcaatctgcgcagcactgattttaccatccgtgttaggaagcgcaagaattttatgacctgtattctcaatagaagctgcctcgtgacaattgatatgtcccgtatccgctgcaatcacgctctgcaccggtgaaagcgccgccgcaaccacaacataattggcctgtgtcgcacccggaataaatttaatcatggaatcatctctgccaataagccccttaataatctgctcagccttatcgcaccactcatcctcaccatatcccggatagctggttgtatttgtatccgccagtgccttcaaaatgcaatcaaatgcaccgcggttataatcgttattaaatctaatcataaaaatctttcctttcctgtcttatcattatagagagcctgccccgcaacaaccggagccttgcggaagataggttgcaagacgtcttggggacgtctgttctgcaacgaccgtagcaaagcggagaccttggacccatggggcctgctctaccacgaccggagccttgcggaagatggggcgagtgaggtccgggggacctcatgccacgagccgaccgagccggaggcgagaccttgaaccatgggttcaaggctcgcttcggctttgaacaacaagacagggaccaaacgctttgcttggtccctgtcttattgttcaatgcggaagatgggacttgaacccacacgattgcaataatcacaagatccttagtcttgctcgtctgccagttccgacacttccgcatgtattttgttttcgccgcttgtctcacgcgactcgtatataatatcagattgttttcaaaaatgcaagcacttttttcaaaaaaatcatatttttttacaggctcttttcatagcacaaaaacggctgcccaaacaggctgcattcacccactgtatcaaatccaaacactgcatacgagcgcagagccttcacattgagcttgttgactaaaaaatgcacacttttgtaccctctccttgcgagctctcccatcccaaataccagcatttgtctcgcaattttctgattctgaaaatccggatgaaccgcaagtcttgaaagctcagcccctggtgccagcttatggctccagcaatcaagtctctccacctgtggatcatcatcaattgaaatcgctgcgataattctgtcctctttgcttccggcatcagcattaatctcctgcccatcaatcattacaaacaaagattctctaccaagatcaaactcaatctccttcattcccggataagaatcatcccatggacaaaactccctgcctagctgtatcttatacaattttaaaatttcttctttattttcttctgtagctgctactatttttctcattctgtttctcgtttccaactaaatataatggccaaaggggggctcaaccttgcaagcttaaagtttgtactctaatgaacatgaaactaccttcttataaatgaaaaatcatatacatttctgaacttttgcgttactctctgattgtgtgtataacaattataatacgataaccatacccattgcttcgtttctttttctaatcgacaatcctccatttgacaaaattccacaaccccatttggtagactgttagaatttaatacttctgtcaatgctcttgaaaatgtatttttacattctctaatttcttgaatatgttttgtttttttcatattttctttcgcaattgctactttttttaatccgaatggaatcccagattgttgataatccaacgtatatccaaggcgaatatagtaaatgataccatctcgttcaataaaagcacttgatttagtcaaattcgttttttcattgttttttatataccaaatagtaattgggacaattataatcactaaaaccatccaatacacccaatacacatccgaaaaacatccaaaaaagaataacaatccccatacaagaataattatgccaaacatcaaattaggatgtttttcgtaaatcctatgactttttatatctcttttcatataaacaatttcatttatatcgttgttgatttccatatttcatttacctcaaacctaatccattaacttcaaattcgtctctcagtattactgaaatttattgtttaaaacttctaacaataaagtaaaccagccattctaccactaatatgccataataaaagaattctactgcatgtaatgttataaaaaactgacagataatctactgcccatttctatgcttatttagcaacaatatactccatttcttcgcttttagaaagaatatctaaaagcctgaacaccggtcctgtcggatgagttctaccaccttcccatgcttccactgttttaattgaaacccccatatatgaagcaaatacactttgagtcatccccgcctttgtcctaatatcacgtatttcttttccactatactctttgaccggcaaaatcatatatgtttttactctccccgctccatatcctttctcataagctatagcttcctcgagtccttcttttaaatcctcaaataatgaactcatagaaaaatcacctcctatttttagcagcttcctctctcaacgatttaactaatttctttaaaacgcttttttcttcctctgtaagattttcctgactctttttttggaatgctgtaatcagatatattacttcatactccgcaaaatcagtataacaaactcgtacgctaccacttttacctctattctgaagtggaaatctgaccttgcgaattccaccagttccttccattataggtcctgacacaggatctttaagtaacattatctgaagtgctcgtaattcatcctcacctaatccaatctctttccatctttttgaaaacaacggaacctcaataaaagttcttgtcatttgtaattttcccttctctttttaaccatattacaccctatattatagggcgtcaacacaattcatctttataaaacataattttatcaattttctttattgtcgactgtattttactgctttcacgactgtctcaatgcaattaattgttaatgccaaaatgatgattgagaggaataccttattatagtgtataaaaacatgtgaaataccttctgcatccgttccaagtaactgctcaataccatcaaaaaatccactattcataatcctatcatttaacagccaaatgcttgttaatactccatcaataatattggtaataatggtaacaagcatcactcttttggtatagctgccatcaataagtctcacactgtcccttgtaacacccaaaattccaaatgcaagaatgaaataccatgtttgtctgatatattctaaattaaaaagtggttcatacacacctaccccattttttacaaatgcaatgcataaaatctgtgggcatacaagaaatacaagagtaaagataaccgaaaaaacaattcctacaatcgcatctacttttgaaatcctattagacttttgtggaacaggaggcaaattatctattccatcatttaacccatccaccttaattccttttttataaaagaatgcaaataataatgtcacaaatgcaaatcctgtcaatataccgccaaaaatcccaccgatggttctatagatagctatataccagattgtatgcgatgttaatgctgccataatttgagcaagtaacattcctccactgatgcacactgtcacaattttcaatacatacacatataaactataatacggctgtccaatcaaacaatcctgtgtttcacctttatatttcgaagctaactcattcggggttcccagttccgttaaaacaactttgatatcacgctccgttggagtaacatcctcacatcgttcctccaacatatcttgtatgatcgtctctaattccgccgccacgtcttttttcatggcggatttcatatgttttgtaactgcataaatgtatctgtcgatcaaatcattttttaccatttattcttcctccattaaaacattgattgactgtgaaaattttttccagtgttctttaatttttttataaaccagcttcccatcttctgtgatgatataatattttcttggcttcgttgcctcagtttcccattcactttttagcagaccttgactctctagtcttctcagcagaggatataatgtattgccttctatcgaaataccttttccttctaattcctttaccaatgaatatccatacattggtttatttagttgtgctaacactaccatgatgagtgtgccccgtctgaattctaaaattaatcctgaaacaatttcatcacaattcatcaaatctcctcccttcagtatcctttatttaaatccactgtgtttattgcactgtattgtgcgttgcacactatgtatttaacatagtatactgtgtatcacacatcatgtcaacaagtttatcctttgcattttaagttttgcatattatgccctatattatagggtgtcatcacaattcatgtcctccttacatttaatacaataacgctgaaaaaatgtggtgtcagtgatgggaatagccaaggattttgatatgggattagcgatagtgtagataatacaaaaaggacagtgtcctctcaacactgtcctccctaatttacatgattgaattttcataatcttgtaattcgtgatatataccttctatgatgaccctacttccagccactctataaaccgataaatatctattctttgcaaaacttatttatcatattgcttttctgccaactctgaaatttctacatcaaacttctcattttcttattttacaagcatctcatatgtaaccccatacttctgcgcaatctcgcttgcataagattttccttccggagccgccacttcaatctgataggagcgctctgtccccttcatgtgcacgatcatggaaaacgctttcccatctgtgtgctctgctttctgctgctcttcattcatttcctccacatcaaatgccagcttatgcatatgtgtattataaattgtcctcattcccttatgtaaaattgccctgacactgtccttggcaatgtagtatccttcttcaaacgaagtggtagaaaaggattcattcatcaaaagcagactcctgctgtcagcctcctcatagattgccttaaaacgcttacactcttccccaagccttcctaaatccaatgtcttgtcctcatctgccgggaaatgggtgtaaatacctgtaacaggggaaaatgtaaatgcttttcccggaatatatatgccaccctgcgccaacacaaacaactgcccaacagcctgtgtaattgtcgtctttccacctcggttggcacctgttaagatatacactctcctattccggtcgaaatccatatcattcggtacaatattcccggactcctctgtctcaaaaacagcaagctttaaattgtaaattccacgtgcctgcatcatatacggatcagattcattttctccctctttatatacagaagctttagcaaaggtaaatccctgttcctgcaatttttggatgtactccgcccatttgatatagtagagcagctccggaatcaagtctgtcatgtcggtaatggtaatagaaacatatttgttcagtacttctctgactcttttcaccatatgggaaatcatatggttgacgattcggtctgtataacgagtcacatcctttgcctgatctccctcgggaagcttcacaatgccaccccggctttccgaccgcataacagctgtatccattaccttctgcataggagtgctaatcaccgcatctgcattcacatcaaatggctgaaatttgaaattctttttccatatggtatcctcattgatccgatcctttgacgcaatatggtcataaaaattgcccaggattccggacttggtaaaatatttgctgtttacagatatcagaccgattccgtccgcttcaaagcggtcattcaagttaatacctaccgtaatgctcttaagctgtgaagtgtccattttcagttctgagatatcttttttcagttctgcaaatccgttgtccgcatagattttctccacataggcctttaaacccagaaagcctgcggaatgaatgtccgaagctgccagacatgtatgaagcgcatccacacacttgatataatcattaagctcgtccagccgatgcaaaagatcccagatgcaggcactctcatcatattcccggttaaagctaccgtactccctcagaaagctgatgcgctcgagtatttccataagatcatcacgcatttttttctgttgaaggacatcctcgaaaatatcgcagcggtactgtgtcaccgccggatctgcatacaaacgcgccatcacgttttggatatagttctgctcccgctcctttgctgacagctttttgcagatttgatccatccccagatcatgcatagtcacatcactcaaggtccggtattgtgcatttgtatccgggtataataaactgtattttttctgactcataagcttgtcctctccttctgatctaatatgcaatattgaacgaaatccgtataatttagcttaccccattttaacgcggaagatagagtgcggaagatgggttgcaagacgtccgggggatgtctgctctgcgccgaccgaagcggagcggagaccttggacccacgggcgcctgccacgcaacaaccgaagccatgcggaagatggggcgagtgaggtccggtggacctcatgccacgagccgaccgagccggaggcgagaccttgaaccatgggttcaaggctcgcttcggctttgaacaataagacagggaccaaacgcttcgcttggtccctgtcttattgttcaatgcggaagatgggacttgaacccacacgattgcaataatcacaagatccttagtcttgctcgtctgccagttccgacacttccgcatatatttgattttctgtcgcttgtctcacgcgactttgatataatatcaaatcaaaccaaatatgtcaacacttaatttctatttttacatatatttttcatttattatgcatttaagctagtccagccccgcctttatccggtcctgtatattgaccagacactgtaggagaacaggattgaactgtccgcactctccatccagaatcatctgcattgccttttcatgtgaaaacgctctcttgtacacacgatctgtcagggcatcatatacatcagctacagataccacctgtgccgagattggtatatccaaaatgaatagcatgggcttttttctatatcttcttcgtgcatgttacaccttcttcgtcagatatatttctcctcaaagctttctatgcacattggcttatcgaagaaatacccttgtatgtaatatattcccatcttcttaattatagcatattgcctgtcagtctcaactccctccacgcagacatgtactcctattgtgttggcaagctctgtaaccatcttgacaaatgcatcagaaaaatcatcctccccaagatgctcaatgaagcatttatctattttaatgatatcaagaggcatctccctgatatggttgagtgatgaatatcctgtaccaaaatcatccagtgcaaccttaacaccaagctcctttatctcactgagtatccgcttcatgcgcaccatgtcattgattgccagactctctgtcacctcaagacacagatttcccggttctatgcccacctcatcaattatgcctttgattttcttaactatgtcattctgcagcagctgcaccacagacagatttacgttgaccttgtagtcaggatgtcccatgtcattccagtacctgcagtgcttcgccgcctctcttaatacatgctccccgatcgggtttataagcccaagatactcagcaagcggtataaagtcaaccggatttataaagcccatggttgctgaattccatctgacaagagcctctgcacctgcacagacatcctcccccttcacgtttataatcggctgaaagtacacggtgaactcatcgcactcattcatcgtggcttttctcatgtgcttttccaggtcaagacgctttgtgcttgtgccatcaataccctcgttgtagaactctatacggttttttccttctttcttagcattgaaaagagctatatcagctcttcttatgacatcctccacagttcttgcatctgtcgggaaaaatgccactccggcacttattgtacagtaatagtcctctcccttcaagaaccacggtctgacaaatatctgctgtatatcattaatgatactctccagcctgtcaacagagctgcctgtcactatgacgataaactcatcgccacccatcctgtagcagtggttctcaattcccttcacctgtgtcaggctatgcgatatagcttttaaaagcacatctccgtactgatggccaagcccgtcatttatatgcttgaaatcatccagatctatataaatcatcgcacctctggtgtcgtttttcactgaatcatctataaacttagccagatcctgctcacatctcatcctgttatatagccctgtcaggaaatcattattggcctggttctcaatgcgctgctgataacgcttcttctgtgtgatatcatacagtgtaacgagctgcaccttgcggccatccacccacgctatgcctgtgcgatgaatatcaaaccacttgtcctcctccgtcacgtagacctctgtaaagctccggctctctgcagtatgggaaaaaatatatttttccagcttgttctgttcgattatatttgaaagcagctgcttacagtaattattcatgtaaagtatctctgacttagacatatcagccacgtatataccgcagccggagttttccagtatcgcttcgagcgaagcataggagcctgcaagcgagttggttgttatcttttttgtgagaatactttgaatgacgcgcttcgtatcatttaaaaacttcacatcatatttttcccagcttctgtcatccttctcatcaaaaaagcacacatacatctgagtcctgttatctatatttacaggctggaatatggctgccctcatagcctgcttctccatgaaaaggcggaatttctccggcatcacagagtctgatgatataatgtaaggctttcctgtgaaaaaaggtacctcggtaattgatattgtatcaaacggctttctgccatagcttacaatcacatccaaatgcatgccgtccacgtttttgcggatgataaaagcaccggtaagctttatggtagtaactgcactctccagtgctttttgagccatatcagtaaagcttccatccatctcaagcagttttataacagaattgatagcctcaagcatatgaaactgtttcttgatttcctcatctgacttcctgataagcgaaagtgcctcattcgcagcatcctcatctctctttgtgatcaaaagctgtctggtcatagtttccaggaactcaattgttctgttaagacgcgcttcactggtaataattatgccatcaggaagcaggtttctctcttcattagacatctgctcatcaattaccgcagctataatccaatatatatcgtgggtattgtccactcttacaatcagaccatacagcctgatatagtccttatccagaggttcatctatgagattctcaaccctgcagtccgacagtctcaaaagaagtttttcgtatttctcctcaccaataaatgtaagcatactcttccatttatcgttacattgacacacctctgtcatgactccatccttttttgtcagacacgacaaatatattccgttgaccatacagaaataatcctgtattttttttaaaagcttggaatctgacatattttcctcctaaaaactcacacaaatcaatcctcatatctgataacaaacaaataaaagtcattcttatcgagaatacatgtctcctgaagcagacggtattcgacacgcagcctgatttgtttcttcacaaacccaatctcatttgaatacatgactatgattccgccggataccagatgctctgcggccttgtcgaaaaacctctcgtaaaaaagctccatctccgccttggtctgtcggttacgaaccggcatatccgtaatcagctcatcaaatttgtagtcatgtctgaaatcaaagaaatccctgtgtataaaattaattcttgttttggcaaacgcagcattctctctgcccatagtgattgcatctccataggtatctgtagcatatatctcgcgtgccggaactaaatgtgcgcgctctataagcagtgtaccaactccgcagaacggatccatgatttgtgccgtttccttaagatacggctttgcaagtgaaacaataagtgccgcttgtgacggatgcatcgacgtaggaagcacattctttctgtatgcaaatctattatcctgtatagaacataatctcatgcagacaaaataattgtcattttttgtcggtatgagcttaatcaccacgtcgtaatcatttggcgaattgatcatcctgcccgcaaaatgcatatcgatagctttcgcaagcctgctctggtacgccgcatctgccgtgctctcaatacgatagtaaaacggaccaccctctaggtgcatgcgtcttaatatatcatacatatctgactctgcaagaagtccggctgctttctgtgcatcctttggcagaagcgatgctgcatgtatggtaaagtacatttttctgaatgtgcgcacctgcatgataagaggtatattgtcagtctttacaagcactccaagcggatgcagctttgtatccttaaccggtatctgacgtcgtaccacctctctgtgaaggcggtttgtcatcagaagcagctcagcctttactccctcgagcacaggtgtatggtgctttatcccattatatttaatcaggattttatttatctcgtttaattcttcctcaatatgcttcctattttcagctgtgaccgtcatatgctcaagctcttttgcacgttccataagctgtggcaagagctctttgcagtccagctgtgacagcgccgccagatatgagccctttacaaagcgcatctgttcagcctcgtatgctttaaaaacctcatcagaaagctgtgacatatgaagatctcctatcagaagcgctgcgttctttctggtttttgcatcttctgctcccataaacgacacaagcagctcatcttctcctgcaagcagctttagagcctctgctaatgcattttcatctttaatctcctgtctgaggctgctcagattctgacgtacattctctttttttaacagatttccgataatttccttcattttttaaatcatcctttaatttattgtatattgtcagttttggcttgcctcttcctttggcacaccattttcttcgatgtatgtatccagatccttgtgaaactgctcccacgcatcctcatgctccacgaaatatagcggacacttcttgcctgtcacatcgtagtgccttattacatcatcagcactcagatcataccgccccataagccatgtggtgagctctatgagcgactggtatgtgctgtcgttgaactttcctgtctcatcctctatacagcactctatcgatattgtgtcactgtttctgttattagatgcatacgatatctcattgcaaggtatgcactgcactatctcaccctctaatcctataacaaagtgtgagcttgctttggtctttttggtctctgccaggccattgaaatagtctctgttttgtctggctgacgtacccggatttgctgtataatggacaactatgccgtttaccttctcaagtgccttctgtggtctggaatacggattgggtgtcagcaactgtacatcaagctttggctgtataggattgtaaagagtactggtcacctctgcctttacttcttcctgctttgcctttttgccccttaaagctcccacaatgattatcgttgcaattataagtattatcatgcctataacaatgccattgccaataagctgctttcttctaacctgggcgcggtgtctctttctatattcttcgcgctttctctgtcttatcttttcatactcgtccatttaattatccccggttatctcttttgtttgcttttatatatctattccaagcttttataaacatttgcatacatataagagtatattagcacaaatcgtcttgttatgccacataaaataatacaaaagcaccagatattacgacgtaacataatacccggtgctttattataaatgtatattcttattattaatcacacttaatctcgtgaacccatccatccggtccatcaatatggcccatctgaatgcctgtaagtgtgtcacgaagcttctttgtgacaggtcccatctcatccataccgcttgggaagcagatttccttgccgtggtctacaatctttcctaccggtgagattactgctgctgttccgcaaagtccacactcagcaaaatcctttacctcatcaaagagcacctctctgtgctcaaccttgagtcctaagtacttctctgcaactaccatcagtgaacggcgtgtgattgatggcaagatgctgtctgatttaggtgtaacaaatgtgccatcctttgtgataaagatgaagtttgcaccacctgtctcctctacctttgtacgtgttgcaggatcgaggtacatattctctgcaaagccctgtgcatgtgcatctacaatggcatgaagactcattgcatagttgagtcctgccttgatatgtcctgttccgtgaggtgctgctctatcaaagtctgatacacggattgtgattggctttgcgccacccttgaagtatggtcctacaggtgttacaaggattctgaactgatactcatcagccggcttaacaccgattactgcatttgttcccataatgtatggtctgatatagagtgtagcacctgagccgtatggtggaacccatgcagcatttgcctttactacttcctcaactgcctttacaaatctatcctccgggaatacaggcatctcaagtctctcacatgaatccttaagacgctgtgcgtttaagtcaggtctgaagcagacaattctgccatcctctgttgtgtatgccttaagtccctcgaagcatgtctgtgcatactggaatactcccgcacactcattaagtgtcactgtatgatcctttgtgagctgtccatcgtcccactttccatctttataattagaaacatagctgtaatctgtttcctggtagccaaaactaaggtttgaccaatcgatatccttcttttccatctttatatcctccgtttctttacggatccgatataacctagcgttatcatatatcgggtctactatcatttatgctcattctagtacaatagaaaaaaaatgtctagtactatttttttataataactataacttaagtttctatatagctttttttactattataagataaggcctgactttttcttacttttttcaatagctgtattaaaccttccaaacggacgcccaagcagcagtccgatcacaagcgatattgctataaatataagaagaatcgcaagatccttgcaataatcaaagcggtacatgcctcccacgcactctcttagggcattcatggcatagttaaacggcatgaacttatacagtgctctgtacacctgcggcagcacctcaaccgggaatgtgccgcctgcgcctgccacctgaatgaccataatgactactgctacagcctgtcccacattgcccaaggctgctgtgagtgagtacataagaagcgtgaatacaaggcttgtcagcgcgcttgcgcaccagaaaaggaacggatgcctgcactgtattccgacaaagaacaaatcaccgagcactgtcacaagtgtctgaatctggcctatcacaaaaaatgtgatatatctgccaaaaaacttatgtacgctgtttactttgccaagtgattttatatcgtcagtgtcctttacctttgttttcacaagtgcaacagttatcaaccctcccacccacagagccagcactgtgtaaaacggtgccatggctgagccatatgtggatatctcatatatcttctgctcgtccatagacagcggtgatgtcacaaactgcgcaatgagtgtcggatctgtctgaagcagctttacaatctcattaaactgctcatcgtttgataaattatcaaatcctgatataacattatgtaaaccatctctgatctgctgtacatactgtctggtatttacaatatctgcatttcctgatttaagaactgccgaatagtcatcgagtgctttttgtatatccgggaagctgttgtccagagaaccaagcatggactgggtctcaataagtgcatattctatatcatataccgctcctgtgagattcggtgacacgctgtggtcaaatgtatttttaagtgtatctattgcagacttggcacttgacacatccgcttttattgattccttaagaagctttagcttatctgccgtcaattcagtatcagacttaaggtcttttatctgtgttttaatgctttggatatttttcctgacagcctctatctgcgagctatcaactccctttaagccctcaatagcggaaagagtattctcagcaagctgctctaccgtatcaaagctagccacggaaacagatatatccgcagtatcggcatcagctaatcccgacgcatttaagagctgtatggagttttccagcacatcgagctggctgtttatgtttgataagcttatgtcgaccatctgtgtgatggtttgtgctgtctgtgcacccgaaagcaccgatgactgcatgccgcttaccgatgactgtcccccgtcaatcagcccctgcacactcggaagcagtgactgtgtcgagcctatcaggctgtctgctgaatccgtgagcatggcaaatgtatcgagcatgcctgcatatgtagaaagagtcgtatccatatcctttagcttgtcaacaactgttccggccaggttatcgcctgatttgccgtctcccactatgagctctcccgactttgacgctatctctgtaatcgtgctcaccattgaagagtttacagactgctgcaccgtggtcttgacctttgaggttatctttgttgctatggcatttttcttgctgttttcatagtattctatctgcggattgaccggctcaccgcttaggaagctaagcatatcagctgaaaaatccttcggcactataaatgctgcatagcactttccactataaacatactccagtgcctctttactgctatctgtgaaaatccagccaattgcatcgttttccttcagtccctttatgacgctgtctcccatacatagctttaaatcaccgacgctcattccctcatcctcagaatatactgctatgtgcatctgtgatgtagcttcctctccgtaaggatcccagttggacataatattaaaccatgcatataaagccgggatgatgccaagtcccataataatgactatggcaaccacatttgtggatatacgtttcaggtcagccagatatatttgaaatatttttttcattgctcggcatcctcccctgtactttgctgcatcgtatcaaatttctgctccgctctttcggctatttcctgcaccctgtcctcaatctgcacgacaggactcacgctcatattctgcgcatcacagccgcttatctcattcatcttctcctgcagcttatagtccacatactcgactccgattaaatacactgcgatagcaaacagactcactatccacagcacaagaaaaatgatttttgagctatccggcacaatcatcagcagaacaagaaaaaagagcggaatgatgtatatgcaccttaatcctatttttatccgtttttgattctgctcgtgaatggtcttttcatatccgaccagcttatcatacatctcgcgcagtctcttatcatcggatagcggctgctcattcacattattatttgcattattattcatatcattatccatattggaatctttattactgtttctacctgtatcctgcatactttccttcccgctttatagcttacggcacatcagaagtaccatattaatatgccaattatcaatttattaattgtacatttaactatagcatctcagtatcttccatacgcttctctataaaatgattgagtctgataaacggctttcgtatcacaagtcctatcaccaaagaggctgcgccaaaaagtaaaagcgtgatataacatttgccgagtgtgttttcgtacatacctcctatacactccctcatcgcatttatcgcatatgggaatgggaagaaaatatacactgccctgaaaaatgccggcagcgcctctatcggatatgtgccgccgcttcctgcaatctgaagtaccatgacaaccaccgccagtgcctttcctatatcaccaaaggatatggtcagagaatatatgagcagtgaaaatgtaaggcttgtcactgcgcctgtcacaataaatgaaaccggatgcacacactgtattttaagcaggtataaatcacccagcacaatgataaaagtctgtacctgtgacagtaaaaagaatgtcagatatctgccaaaataaagctgtgaaggctttagtttcccaagctccttagcatccgcgtgaacctttaccagcgaaacaagtatagtcatgcccacccatatggcaagtgtcgtgtaaaaaggtgctactccggagccataattggctatctcgtagatataattatctgatacctgcaccggctctgaaaagaagctgccaagcttttcaggattccccgaaagcagattcactatgatatcagctttttcatcctcagaggctgcttcaagcttgtcgagtgtcgtatttatcttgtctgatgctgattctataatactcttaagctgtgtaatgctcatattgagtgtgtcaagcgtgctatccactccgtcaaatacctgcgccatagagcctgatgtctggcttagattgccaagtgtggtctgcattgaatcaagaacagacgacatactgcttatcatgccgtccacctgtggcactatctgtgatgtatatgtatcattcactgctgacgcggtcgatgaaagagccgacattacactcttaagtgtttctgcagaattctgtgtttttcccgataaatccacagacagtgtactttctatcatgctccttgtctgctccttaacaagctctatattggaaataagtgtgccgacatgggtatcgtccatatccggctttattttgttgattttgtcctcaagattgtcaatattacctttcaaagcatccgctgactgtttaatattttgcacatcactttgaatagtatttacatcctgtgacagatttgcatctgaaatctgctttgatatatcatcaatcgagctcttcacctttgctaatgccgatgtgatatctgcactaaagctgtcgaaggattgtctggtggactgcagatcatttttactctcttcaagcctgtctgtgccctttgcaagcttatcctgcccatctttgagtgcttcgcccgtttctttagacacctgtgacaacgccttatttccgtcaataaacgtatctatcatggcatcgtactgagcaagactctctgataccgcttcaagcttaccggtcatctgccccacagcatccttttccttcatgtcatcggatattacgttggtctccttaaatacctgctctgcaagcacctttataaactgcttattaatacttgatttaacagcacttgctgcactgtccgttatctttgtcgcaacagcatttttcttgtcgttgagatagtaggtaatccttggattttcaatattgtcagctacaccatgatacatgctgtaggtaaactgctcatctatgacaagtgcagaataatatctgcccgacttaacaccctcaacagctttttcctctgatttaacaaatttccagcctatagtatcctttttctttaatgactctaccacaccatcgcccatattgacagtttcgctgtcattcttcgtccagcccttgtccagattgactactgcaattgctatatttccggtgttgccatacgggtcccagttggcatagatattaaaccatgcatacagcgccggcagcacgcacagtccaataactataatgagtacaagcacatttcggaatatgccgcacatatctcttttaaaaattcttaaaatatcagccatgaatcatcctcttatatccggtgtttatatccggtgctgtttaagctccccaataaaatacaatgagccaaatgcaacatttttcgtatctcttttcaggtgctttcttatctcatcaactcctgaaagttctgttgcctcaactccctcttttctgataaaatcagcaaggtgcgatgcctgcagtgccctgtctgaatccggtgtcactgtataaaactcctcagcaagcggcaaaatctcacgtatcatcacatcatagtccttatcagccatgactcccatgaaaaagcaaaatttctcacccggatacatctgcatgaggctttccttgagcgcatcaactccattgctgttgtgtgctccgtccactagcagaaacggctccttcgatactatctccatgcgccccggccacacagcctcttcaagtgcactctttatcctgtcattcaggtctgtttcctctctctttggctctgtcttatcatattgcatttcgtattccggcccgctatagtgctttcccagcacataccgcgccgcaagctctgccgctgctgcattctcccactgaaatgcgccacaaagcctcagtgcgtagccgctgcagcgtgctatatcgctttgctccacagtgattatccttgcatgctttttttgcgcttcctgttcgattacctgcatagcacgtttatcctgctgttccaccaccactgtgccgttttcctttatgataccggccttcccagccgctatatccgctatatcactgccaaggatagccatatggtcatagcctatctttgtaataacggcacattgcggtgtgccgattgcgtttgttgagtcaagcctgcctccgagtcctgtctcaatgaccatataatcgcactgctgctcctcaaagtacaaaagagccatggcaaggcagtagtcaaacatcgtaagtcctatgccaaaatctatatcaagcagatagtttccaagccgtgtgacatcctccttaggtatcatacgcccatcaaccgtaatgcgctcctcaaaatctaccagatgcggtgatacaaacgtgcctaccctcatatgctctttttttaatatactggaaaaaaaagcgcacaccgagccctttccattggtgcctgccacatggatatacggtattatgcgcttttgctttcctttttctctcagcacctttatgacctgtgctgtcaccaccactcccggctcattgccgaaacggcgtgtgttttctattttgtttaaaacctgtgtgtaatctaaatttcccatgccatcattataatatatccggccgataaaataaagaccatatccttatactgctataataatgcctccgtcatttgcatacatgcttgagatgccggcagtatccacaatgacaatcttcttaaatctggcaagcttctcaaggcatgccttcacatactgtgcacgctccgggcagttgcagtgtgagattgcaagaatcctgtgctcacagtcctttgtggcagccacaacatcctctaccatcttggcaagtgccctcttcatgcctctggcctggccaagctgctggattgagccctcatcggttgagcccatgacaggctttatatttaaagtgctggccacaaaagccttcaggttgcttaatcgtcctgcctttcttaatgtatcaagtgtctcaagcacaaagaaggtattcattgaagctatatactcctctgtctgctttacaacctcatcaaatgaaagtccactctcttcaaactcctgtaccttcatgccgattagtgtctcgcctatagatgctgagcgggaattgaatacatagatttgcttgccacagtcctcatgctcctcgttgtacagattgactgctaaaacagcgctgttgtatgagccgctgagtttgcccgaaagtgtgacaacatagatatgatcagcctctccctcaaaggcctgcatatattcctcaggagacgggcatgacgactttggcccctttacgctctcctttactcttcttaagaaatcatgctggtcaaagctctcatcatcgcggattctgtatccgtcaacatcaagctcgagtgccacattgcaaaaatgtccatccttcttaaggctgtctgtgagctcaccacagctatctattataatcttatacatatctattcctcctgcactatatgataataaaagtttaaattacttttttaaaagttattttattccgtaacaagtagttttcattactacgtcatattaacactaaaactaaacttatgcaagagatttctgtatttattttcccataatggttatctgccctttaatggtacccgaaaaaggccgtcacacagtcgcttaaggctttcatgtcgcgtactcccataagctcacaggctgagtgcattgcaagaataggtatacctatatccacagtctttaccggcaaaagcgtacctgcaatcgagcccagtgtgctgccgccacgactgtccgaacggttcacaaaacgctggtaaggtatgcccttttcatcacacagctgacagagaatggcgatagcctgtgcatccgtagcatacgactgcgaacacgcctgcttgatacaaaagcctttacccatgacaggcttatttgtgatatccatcttttcctttttattaggatgaagcgcatgagccacatcaacagacataagcatggcatcatatatgctctcatctatttcattttctgaaaggtccatatttcttaaaatacgcctgagcatatcgtgaagcattatagaggcagcgccctgcttactgttacttccaatctcctcatggtcaaaaagcgctatgatgtttattccatcagctctgtttccatcctctatggcatcaagaagtgccctgcaggatgactggttgtcgattctcggtgatgaaatcatggtgtcattcacaccgacaaaacaaggctcctccatacaaaatgtattgagctcaaagtctatgatatcgctcttttccacagacagctctctagccagaaagctaaggaaataatccgtggtcctttcatcctcaggtattgaatcaagcaccggcatcagatccacctgattatttatcccgacacccttattcacatccctgttcatatgaatggcaagatttggaataatcatgacaggctttttagacctgtagagcaccatacgcggattgaacacatcctcactctttatagccacgcgccctgccactccgagaggtctgtcaaaccatgtgtttaaaatcggtcctccatacacctctacattaacctgtgcatatgagtttgtcataaaatccggatttggctttatgcgaagatatggatagtctgtgtgagctgccgctattcgcaccatatcctttttgttgtagccgcttcctaccgtaaacgcaaacatggtcgtatcatggtgatttaagacatacctgccaccgcgcacaagcttccagtcacctgtataatctatctcctcaaatccgttttccaaaagctcctgctttgcagccttcacacactcgcatggtgaaacagccgcttttagtaaatcaaataatttttcctgtttcatggattgcctcctgttttcattgcataacgcatttattctaccacggactttacaattattccagttgaacaggctttatttttaaggctatttttatatctatttttatggcataatccgcgaatctgatgtatgatataataatcgataactattcaaaaaccacttagaacaatcattcgctgtcacatacaatgtggaaaatgaggagaaattatgatatcaattgaactgacagacacaaagaactttatgaacaagctgcttcgcacggaaatctttgacaacttcctgctccaggaggccgtcatcacaaaggcagcctcatacgtcatagatggtcacctgcaaaagggcttttacagctccacagagcttgaggaaaatggtatagctggctatagcatactcccctttaggatgcttcgcacaaactgctttgacctgataaagggcagacagactccatcgtcattcaagtttgtctttctgctttcacctgaaaacacggagcacaccctaagcagtctgcattctgctttcaccgtgtccgatatcagtggttttttcattaatatcaggtatcagagccagcttctgactctgacaaccggaatatcctacaatattttttcagcggataagaccttagacagtgaatgggataagcttgtaatgaaatttttagcaaataatgacataaactttaaagaactttgactttattgctttacatcttaaacccgttatgctattctaacgttagttgcgtaagcagcattattattatttggaggtactttcgatgagcaaaggtacagtaaaatggttcaataaccaaaaaggttacggattcatcacagccgaggacggaaaagatgtattcgtacatttctcaggacttaacatggagggcttcaaaactctcgaggaaggtgcagcagtagagttcgatatcactgatggcgctaaaggtccacaggcagttaacgttgaggtagttaaataattttgaccactcaggcaatctagtttctatgtacctttttctttattatatatttaggtaaaattatagttacaaaaatgttaattggggaataagatataagaatcatgattaaaaaagaagagttcatttcgaactcttcttttttgcgcttttttatttgaatgattttagttgtttacacgatgatgagacatcggtgagcttgtggtgagtggtaaaaatgtgtaaccattcgcctgtccccactgtatgatctgctcgaccgcattgacactgaaatcctttatgtcgtgctgcaatacaactgatacgttgtggctctgtactcctgaaatgacattctgcactacctgttccgtgctgattggcttgctgtttgcatctccgctcgatacattccagtcacagtataaaagccctcttgctgtcacatcatttacgagctgtgtcataatgcccggacaataatccttacttacagtatttgatgagccacccgggaatctgatgattgacgcatcatttcctgtctgtgcctttatgatactgttcatctgctcaaggtcatcaaaaaatgcctgctcacttgtatatatctggttgtatttgtggctggcagagtggatagccactgtatgtcctctctttgcctcctctgctatcatgttctgatagtcaggatgtgtatttgtaacaaagaaggtggcctttacattgtatttatcaagcacatctaatagcccctgtgtatactttccgggaccatcgtcaaaggtcagataaataatcttgttgcccggatttactgtgtctgccgtggcagccggatcatacacactgaccactcttgtagctgtagccttattgcctgatgaatctgagacctcatatgtcacagtatactttcctgccttatccttatctaccttatctcctgataccttgacactgtctgtaatgtctccgtcacaattgtctgttgccgtatatcccggatcactgtacttatcaccctttttaactgacataaaatcatcacccgaaagctttatctgcggtgcagtggtatctgtgacatgcacagtccttttgacctcgctctcattctttgacgagtcagcgacactgtactttatctcatagtctcccggctttgaagtatcgacagctcctgtgactgataccttgtctgtcagatccccatcatagttgtctgttgccgtatatcccgggtcactgaacttactgcctgcctctacagtcatctctgcatcgccatttaatgtaatctccggagccttcttatccctcacctcaaccttgattgtctgtgtcgcagtttttttaccgtattgagcagttacctttatctcgtatgaacctgtctttgtcgcatcgacattactgtctatagtgcattttatctcttttccctttcggtttataagcctgcctctgacatacgccttgatttttggtacctcaaactttttgccatactcaacagtaataccgtttttgaacttgctgctgaactcaatatgtgaatcaaagcatgtgatatacactataaacgccaccaccagaactattgcagccgtaagtatgccgataatcatctttttatttttgtccatttttccaatcctctttagcattttataattattctctctatattattactcaaacctgataatattatttcaagcagtatctattatagcgttaaacaatcttttttgctactgcaaattccttgagaatttcttaatgttggcttcatatatttcatttatgttacaattgtttctttatcatgaatacctccggtgcagtcttaataagtaattaatttatttaatatatttgttactattcagttctcaatatgactaaccacatatctttttgcagatattcgcaatcacaaaaatcccccgaacaagtcgggggatttaaaaagcttatgctgtaacaatcattttattactgctccttacggtgcatctcaaatgtctccatatggtagttggcgatgttgtcacgaatctttctgtcatctgctctgcttaagagatcatcacggaacttcttggtagtcaccatgtcattgtatgagcttggtccgcctacgcagccgccctcacatgccattccctcaatgaagttctcaggaagcttgcctgccttcatgaggagaagtgccttcttacactctgctgctccgtttgccttgcaaaccttacaatcaacatcctcgcctttttccttcatgctctcgattacggctgctgtaactccgcctgagtttgcgaaacgcttaccgaatactgagccctcctgatatgaggtatcatcagcctcaagctgtactccctttgccttcataatagcacgaatctcgctgaaggtaagtacataatctgcattgccctctatcttctgatcatgtacctctgacttcttggcaacacatggtccgatgaatactgtaactgcatcagggtcctttgcctttatcattcttgaaactgcacacataggtgaaacagttgtagaaatcttgtcagcaagctcaggatagtgctttctaaccatatttacaaatccaggacagcatgatgtaaccttcttctctcctgcctcgtatgcctcaagccactcgtcagcctcgtatgctgctgtcatatctcctccgagcgctacctcaacaaaaccgttgaagccaactgcctgcatagctttcttccagctgttcatagtgatatttgcgccaaactgtccctctgctgcaggtgcaaccatagcgtatacatgcttgttctctgacttgattgcatcgattacatctacgatgtatgtctttgatccgatagctccgaatggacagctgtggatacacttaccacatctgatacatttgctctcatcaatcactgaaataccgtactcattgtatgtaatggcgtttacaggacaagagaacttacatggtctctttaaatgagcgatagcgttgtaaggacatgcctgtgcacagcgtccacactccttacacttctgtgggtcgatatgtgagcggagacgtcctgcctcgattgctccaaacttacatgcattgatacaagccttgccaagacagttctgacagttctcagtaactgtgtagcttgaaatcggacaatcctcacatgctgagctgattacctggatgatattgccgtcatcgtttgcgcttggtgctttaccctctgcaagtctgacacgttgacggatgatctctctctccttgtagatacagcaacggaactgaggtgtcggtcccggaatcagtgtgaatgggatgtcatctctgatctcatcgaggttacctgcaaatgcagcctttgcgacctcaagcaaaactgcatgtttgattttgattacgttttcgtcagcgtacatattatctccttttccttaaaattaatgtatattgttacctaatgatttacatacttagaagaatcattacatcatgtgacacttcccatatcacatgagctgattcctctaaaaaaatgctcctagtatttatctactaggaacattttacaaaattttttaaactttttctacccttgtattcatcaaaatacaaagaattgttatttttttcacaatagcagcaatttcaataagaattactcatggcgcaatgcgtcaatagggttcaggttcgctgccttgtatgatggaagcataccgaatatgattccgattgccatggaaaaaagcaccgcaagtatagctgctgccggacttatcgctgtcggcgtgccgtttagcattgagatgaccttagagagtatcactccgaccagcactccgactatgcctccaagacttgtgagcacaactgcctctgtgaggaactgtccaagtattgctccctttcctgctccgattgcttttttaagtcctatctctgaggtacgctctgtgactgacacaagcatgatattcatgacaccgataccacctacgagcagtgatattccggctatccatataagcatcatattggttgactggctgagctgctgtatctgctttgcctgctcctgtaaatcctgtgccttgtaggtcacatcagagccgtctgtgacatttaaattactgttaagtatctcctcagcagcctttcccactgtagccatggtatccgtgctgtctgccttaagcaaaaggttctgcggctcatcataaccaaatataaccggccatgttccgcttggcacaaatacattgccctggctgtcatcatgggcatacatatagtaatcatccattgagtttattaccaggtcatagctgtccttttccgtgactacaccgactactgtaaacggatatccctgtatctctactgtcttgccgagtgcgctctctcctgaaaacaggctgctctccacgctctcatcaataagagccaccctgcgtgcatttgcatagtcattctttgagaagcctctgcccttcatgactacatagcttgcagtatcgaaatatccgtcatcgacacatgttatattgccgcccgaaagcgccgtgttcagataatagactgcattagaagcctgtcttgtacggtaaagagctgcatttttcacatggtcgagctcctttatgctgtcaagtgtggcagccgatacctcagtcactcccgccggcgccgtttcatatgataaatccatatcatagccatccttctgcagtgtgacctttacgttattacttcccgaacctatgaggttcttttctatctgttcgtttgtgccctgaattgtggaaacaatcgcaataattgctgcaattccgatgatgattccaagcatggtcagaaacgaacgcatcttatgtgaccagattcccctaaaggacaatctaatattttcaagcatctttaatcctccctgctaaactaatacataccatcttccgacaccttggttttctcgccctccctgactccatacgggaatgcgatatagtcatcatttgtcagacctgactttatctccacatatgagccccagagcgacttgcctgttttgacagactgctttttgagctttccgttgtcatccttgtatatatatgactgtccgttctctgttctgacatatgacttgtcgatatatagtccgctgtcagagccctccgatgatgtatctatggtcaactcaagtgaatcgccctttttgagattctgcggattctcaatgtacgcggtgtactcatagaatgaggagtttggattgctgtctccataatagtttacgctgtctgacggcacattgcttatctcggatatcgtgccctcataggtatcacctgtcatgtagttgactgctgatacgctctgtcctatttttaccgtatccagatccagctcaccgattgttccgctgatatacagtcccgatgctcccgaaagctgcaggaaaggtgtaccgtccttcggtggattggcaggatcacagactgttgtcacaattccatccttctttgcatataccacgccatcctcaagctcgctctgaagctcctttaaatcagcctgtgcaattctcttttgtaaatcaacatcggcaacacttctggtctgctcctttatggcatccttaagctcatctgcagtgtatgtcttttcttctgccgcgttatcagcttctgtctgtgcggtctgttctgtggcactggctgttttggtatctgacgactcacttcctgctgtatcatcagacgcatctcctgctgtagttgtgcctgcaaggaaaagctttatctcatcgctttcatcatagccgccaagcctatctcctcttacgataagctccatatcaggtgcattcgcatctcctattacaaaccgtgctacagcgcttttatcagcgagtgtattcaaaagctctcctgatacatatgaggcttctgtacatgtaaatacataaggatcgtcctctgtaccgcttcctttggcctctgacaaatcagatatcacatcatgctgttcatcaggcgcagacggctgtgtgtcaggctgtggctcaggtataacaggagtctcgggctgcttttcaaccggtttagtgttctttagcttgtcaagcttctgcttttccgatgcaagctggttatcaagactctgtatctcaagctgcttcatctcaaccgagagcgaaagactcgtcacatcatatgcaaggagcttatctccggcctttacctgctgatcctttgtgacataaacctctgtcaccttctgtccatcctttaaattgattgtctgacatgcatcatcacacaccattccctcactggtcatggatgtgtagtcgtttgtcgtgctgatcattgaaacactcatgacggaagcaagccccttggagttcctgtaataaacaactcctgtgatgcttcctgctgcaactgcaactacaaggacagctattataatgatcttaattctctttttctttttcattacctgcctcctgtccttcctctgttatctcgccgtctatgatgtggacgatgcgctttgcctgctcggctacctttctgtcatgtgtaatcacgacaaccgtcacaccggactcattaaggctctcaaagagctcaagcacctgcttgcctgactttgaatccaaagctcccgtaggctcatccgcaagcagaagctttggatgattaaccattgctctcgctatcgccactctctgcttctgtcctcccgaaagctgcgtaggcttgaaatcagccctgtctgaaagcccaacacgctctaaggcctccattcccatctgccttctgtcctttttgctcacaccggcatatatgagtggcaggcatacattgtccagtgcactctcgcgtggcatgagctggaaattctggaatacaaatccaattgtatcgcgccttaccctcgtaagctccttttccttaagctcactgacaggtctgccgtcaagtatatatgtgcccgatgttggcagatcaagacaccccactatattcatgagagtggtcttgccggagcccgacggccccatgattgccacgtactctccctcctcaatctggagtgagacgtcctttaaaaccggcaccacgagcttatcctggtcatagtttttataaatatgctggagttctagaatcatctactgtacctccgcgtcacctgaactggtggcatctgcagcaccttcgtccattgtgccatcgtccattgtgccatcatcaacaggaccgccctcagtgccctcaagcatctggtcatcaagagcttctgtacccatatcgtcatagactgaatcttcaccgccgccattttcaacgtactcttcccatgtctgtgccggctcaccctcataaagatcatcagatgcccatactatatagtcatcctttgtaagccctgacttgatttcatacatcatgagattctcgtcatagtctccaagctcaacctttgtcttctcaagcttatcctttttattaagtgtccatacatatgcatcatcgccatcctttacgacatagctctcatcaatccaaataccatcctttacctctgtctgtccgaaatccggctccacatatacatgctgtcctaaaagcatgtcgcctgtgcctgtaagctgcacatagaagttgtactttgatgccttctgctcgctgcttccatcatcatacatgccggaattgctgttatcagtctgagtattctcagtatcaaccttgctgatggtaccctgccatgtctttgactcatcaactctcgagcgcactataactgcctgcccctctgcgagtccactgtttaaaaagctctgctcatcaattgtgccctttaccctgtaatcaccggtggcaacgattgtcataaatgcagtatctgctgtgtctgcactctgattctcattgattttctttacaacaccaatcattgtgctgtttacagtggcatttttgatgctctcatcatacttttctatctctgccttcttcgtggcaatatcgtactgagtctgcttctgctgtgtctgcgcctgctgaatctgcagtgtatagtcaagctgctgatcctttggcgcttccttcttttccttggtgagctgctctatctgtgcatcatagccggaaagcgtattgtttaagctctcaagctcaagcgtggcgctttcctttttcgcagcaagctcctttgtatcataggtaaaaagaggtgtacccacctgtacctcatccccctctgacacaagaatatcctttacagttttttcactgtcagccttgatatccatggtatcggctgcttccacgacaccgctgtacttgtcagtacttcccgcctgatacatgacatcagcgaccttgtttgcatagactcccgatgcctttgctgcattctttccctttgtcattgcaatgacaacagctgacacaatcactgctatgataagcacagctgcaatcactgaaatgattatctttttctttttactcatttcgacctcccggtttcttataattaattgattgattatgaattaatcataccaaatatatattgcatctgtcttttaagatttttttaatattttactaataaaaaatggaggttagtatggaaatagcatttagtgagaaaatttctccacagctgtccgccgccctgttgtccaccccttatgagcttggaaaagagggagggctttcaagcggctatctgccggagagtgatagctgggaagtgatagtaaaatatgtcggtgacatagaaaaaataaaagaaaagtatccttctgtactcatcacgaagctgctcggaaactatgcggtgctcgtaattgagaaatcacttgtaaataccgttgccctgtgcgatgaaatcatatatatggaaaagccaaagcagtttaactacgatgtgtacgagggctctcaggcctcatgcatcactcccgtacacaccaatccatataatctgaccggaaaaggtgtgctcgtaggcattatcgactccggaatttactatgcccatccggcttttatacaggatggtgtaagcagaatcgcctatctgtgggaccagactgtttccgatgatacctcacacagtgatatcatccctttcggcaccttatatgaccgagatacaatcaccaaagccataaatgcagaaaacagcttagaaatgcagcgcatctgtccaagcatcgacatatccgggcacggcactcatgtagcaggaatcgctgccggaaacggaaatggtaatgataatgaacaaaacacaaaataccgcggtgttgcttatgaaagcactcttataatcgtaaaactcaaaacttcaggcggtgccagctttcccacaaccacgcagattatgctggcagtagacttttgcataagaaaatcaatcgatatgaacatgcctatcgtcataaacctaagctttggcacaagcaacggctcgcacagcggcacctcactgcttgaagcatacctggactatatagcaggaaactaccgctgcgctgtctcagtcggctcaggtaacgatggagccggctttggccatgcaaacggcagctcgtaccctgccgatgcagagcttgcgataggctatcctgagccgtctctttccattgatttatggaaaaaatactgggatgagatacagctgcgcattagtgcaccaaataatgatatgctggagattcccgatacaattaccaatcaggcaaagggctttacatacagatacaggctcgatgggacagatatatatataacaggcggcggtccctctccctactctccttttcaggaaatattcattgaactcatgggatcggaatatatctcacccggcatctggaaaatatcacttgaacccatatctgtaaaggacggctcatgggatatatggctgccgtcaggtgctctgcgcaatgcacagacctcatttatccatgcatcgcctgatatcaccctgaccatcccctcaaccgctcaaaatgtcatatctgtcggagcctatgacagccgaacaaaccgcacagccgctttttccggccgaggctatacctgggcctttaacagcataaagcctgatatcattgcgcccggtgtagacattatttcatgctcaaacaccggaggctacacttcaaaaacagggacatccatggctgcaccgtttgtgaccggtgcggctgcgcttctgatggaatggggaattgtgcgtggaaatgacctctatatgtatggcgacaagcttaaagcttctctcataaaaggtgccggtgaaaatgtatttacaactgcctcacgggctgtctctgaaaacacttccaaaaatacaaaataccccaaccctgtgacgggctggggtacattgtgcttactggatagtattccttagtggaagcgctattcgtatacatgcttctgatgcttctttgcatctgccttattctttttcttcaatggatgctttgggtttttatccattataatcgcttccttccgttcgttctgactacgttatacacctgcaatcagcacttgtcaagtaagagtgctatttttaatcaattatttatatttaatacaaaatcgcaatcattttgatgtcgaagcatcgatttgtatgcacaattattgacagtttgctaaatttaattattttctcttcatcacactctttttaaacacagtcatcgcaattcaaaaaatacatcattacatagctgccaaatatacaaaatatgctgcatagcaaagcagcatcaccactccacatggctttctaagctctttatgtcttatcgtaccgccccacaggagcacaccgcacagtattgccacaactgtatcaatcacaaacctgctctcaaacggcaccggacaaatgagagctactgttccgattacaaagagtatattgaaaatattgctgccgactatatttccaatcgctataccggcatttcccttgcgtgctgctgaaacagatgtaacaagctccggaagagatgtgccgaatgcaacgattgtcagtccgataaagcgctcactcatgccgcaggctcttgctatggtcgtggcaccgtttacgacaagctggcttccaattacgacgcacacaccgcccagcacaataaagagcagacatttccataccggatatagctttaccgactgctcatcaccgctgtcattgcccttttttgccagaaaatacaaataaagcagatatgcaataaataaaatccacagtataacaccctcaatgaatgtgatttcattgcctgtcattcccatcacgagaagcaccgctgtgataagaagcatgtacggtatctcgtatttgaatgtggttttttgtatggctacatttgtgatgagtgccgtcactcccaggattataaggatatttagtatattgctgccgactatattgccgactgtaatccccgcattaccctttattcctgcagtgatgctgactgccgcctccggcagcgacgtacccatcgccacaatcgtcagtccaatcacaagctgcggaataccaaatttcccggcgagtgccgccgctccatccacaaacacatccgcgcccttcaccagtgctacaaagcctgctataagcagtaaaattgctacaaaaatcataattttcctccttctgctgtcctttttaaggatgcatgattaattgatagttacagctatgtcctatcagcagaaggtttttgtatacaaaaaaggcgacacttctgctgtataaaacaacaaaagtctcgccatttaatcactctccggattgctgtcatatatgtatgatatgtatgagcaatcgtactgacggataagtaagcactctcgtgccggctactccctttcacttatatactatgatatgtcaacgcagtgtattcgtcaagagaaagtttttcttgcctttatcacgctaacgtggtagcatggttactaaataaactattaaagaggtactacaaatgaaaacatcagaaattattgtatttatcgtctatctgctgtgcatgctgggtatcggtatcttcttcttcgtgaaaaacagaaacggcggagaaaagacctacttcctcggcggacgtgagatgggaccatgggttgcggcgctgtcagccggagcctcagacatgagtgcatgggtactcatgggacttcctacttctatctatgcactgggcttaggtcaggtatggattcctgtaggacttgcaatcggctacactataagctggctgctagaggcccctagactgagaaaattctcgattgtagcaaacgactcaatcaccattccgcagtatctgaccaacagattcctgtccaaatcacttgcactgcaggtgatttgtgcaattgtgtttttggttgcatacactatttatgcggcatcgagcgtaaaggcatgtggtactcttttccacactgtaataggaatggatccacagattgccatgtatcttgcagcagttgtcatcgtaggctataccttcctcggaggcttctcggctgtatgctggaccgattttttccagggcatgctcgtgcttggttctatgtttatagcaccgatttttgcagcatttatgcttgatacatcatctatgtcatcactcccgggcggttacttaaatccattctcaagctggcaggatatcgtgtcaggactggcatggggacttggttactttggtatgccacatatcattatcagattcatgtccatcaaatctcagaaggatttgaaaaaatcagcaaaaatcggaatcacatggactctgcttattgtattttttgcaaccttaatcggagtaatcggaagacttttccttggctttgacgaatcaatcaatgaaaactctcttgttttcatccagattgtaagaaagattttcccgggtgttatctcaggtatactgctctcagcagtgcttgccgcttccatgagtaccgcagacagccagctgcttgctgcttcatctgctttctcgagtgatgtgtacaagcctgtcatcagaaaaggcaaggcaagtgacaaagagatgatgtggaccggccgtattgtcgttcttggaatctctattgcagcactcatcatcgcatcaaaccctaatgccggctctatcatggcacttgtttccaatgcatggggtatctttggagctgcctttggacctgcaatcatgctcagcctcttctggaagcgctttaacttcaagggtgctgttgcaggaatcataacaggtgctgccgttgatatattgtggtatgcattcctcacatcaaccggaatctacgagctgctgccgggatttgttttcggacttatcgcagccgttgttgtgacactttgcacaaatgagccttcaaaagaggtttatgagcttttcgataaagccgaaaagtttgatgaataattaaagtaattaatcagtaaagcacataagtaaaaccgtcgtaccctgctatttacggccccggtacgacggttttatttttttcttatgctttatgttgtgcttttagaagagctgctttagtacctgcattggtattcacctttacaaaggcaaatgtgctgaaatggtctgtctcaaatacaattcctttaacttctacagatgaagcactcgctctttaatctcctgggttcttccctgattccagaactgtgtgccgatatagccgcatgtacggcgggctacgctcatcttattctggtcgcggttgccacagtgtgggcactcccagatgagcttgcctgagccctcttcctctacgattttgatttctccgtcgtagccgcatacctggcaatagtcgctctttgtattcagctctgcgtacatgatattgtcgtaaatgtactgcattactgaaagcactgcagggatattgtcctgcatgtttggtacctccacgtagctgatagcgccacccggagacagcttctggaactgggactcaaactttagcttgtcaaatgcattaatctgctctgttacatgcacatggtagctgtttgtaatatagttcttgtcggtaacacccttgatgataccaaagcgcttctgtaagcacttagcaaacttataggtggtagactcaagcggtgtgccatatatactgaaatcgatgtttgactcctttttccactgctcacatgcatcgtttaagcgctgcattaccttaagtgcaaacggtgtgccttcctttggctctgtgtgtgatactcccttcatatagcgcacacactcacaaagtcctgcatagccgagtgagattgttgagtatccgttaaataataatgggtcaataacctctccctttttcagacgtgcaagtgctccgttctgccagagaatcggtgctacatcggatttggtaccaagaagcctcttatgtctgcacataagtgctctgtgacacagctcaagtctctcatcaagtatcttccagaatttttcctcatccttttctgatgagcatgccacatcaacgagatttaaggtgacaacaccctggttgaaacgtccatagtatttacgcttgtttggatcaaagttctcggcatgtgccacattgcccgctgtctgtgagcatctgtccactgtgaggaatgaacggcagcccatgcatgtatacacatctccgtccttaagctccttcatgaccttctctgaaatatagtcaggcaccattctctttgcagagcactgtgccgcgagcactgtgagattccagtactttgaatcctctgtgatattatcatcctcaagcacatatatgagcttagggaatgccggtgtgatatatacacccttttcgttctttacgccctttattctctggtgcagcatttcctcaatgattgcggcaagatctgcctttgtctgcggatctgatacctcattcaggtacatgaatactgtgataaacggtgcctgtccgtttgtagtcatgagtgtgatgacctgatactgaatcatctgcacaccgcggttgatttcttccttgacacgaagctctgctacctcgttgattttttcttcatctaaatcaaggcctacgctctcgaattccttttgcacctgctttctgaacttctcacgactgacctgtacaaatggtgccagatgtgcaagcgagatactctgtccaccatactgtgagctggcaatctgtgcgatagcctgtgtagcaatgttgcaggctgttgaaaagctctttggtgtgtcaatcatagtctcactgattactgtgccgttctgaagcatgtcctcaaggtttacaagacagcagttgtgcatatgctgtgcaaaataatctgcatcgtggaaatggataagccccttctcatgagcctccactatatcctcaggaagcaggaaacggcgtgtgatatccttgctcacctcacctgccatgtagtcacgctgcacgctgtttacagtaggattcttgttggagttttcctgctttacctcctcgttattgcactcaagaaggctaagaatctgctggtccgtagagtttgacttacggacgatggctctcttatatctgtaagtaatgtagtttctggctacggtaaaggcacgcttgttcatgagctggttctccaccatatcctgtatctcctcaacgcttggagagcgcttcatgttctcacatgcagtctccacgttgcttgcaatttcctcaatctgatcagcagtaagcttctcatagtctagcactgaatcgtttgcctttctaatggcagctacaattttggctgcatcaaatatgtcctcactgccgcttcgcttgatgattttcatgtaaatttctcctctctgtatactatatttcatataatgtagtgtactatatatagtattgccatccaatgcacatactatatatatgtattttatcatatgtaatggcacaaaatatgcagctataaatgagatgtaatcattaattcatgtcactgccctgcaatgtaaagcgggcttttcaccaaacaattacgatatagctacatataaaatgccatattatttaatacaaatctgtgcatctgtcttttgatgacaatctaaattatacaagatattgttgctatgtcaatacgctcaacaatattttgtagcattttgacttattgcacaaaaaaagccacaatatttatgctactttttcaactctgtaattattttgttacttgttaagcttttccatattgtcaatcactctgtccaaaaagccaagcatcatgttaaactcctccttagaaaagccttcgtgcatggcttcctctattaccattatattttccctcaccctgttttcgtggtccagtgctttttgcgtcagctcaatcctcttaagccttgcatcattttccataggtgtgcgcacgatatagccgtttttttcaagacttttaagcatatttgtcactgtggctcctgacagatgaaactttgcttcgatatccttttgaaatatattttggccctgattatccattatatatccaatcatcataccctggcttcgcggtatacattctgttttactgcacctttttctgtcaaaatatctgtctatgctcctgctgatgcggtttatcttgtgtcctaagtatttatccggtgtaaactccttcatatctgaaatcctttcatagatttttcttgacaataaaaaaagtatatctataatatagttagcacactaactaattaaatgcaagtatttttttagttaaccacattaccataaatgtgggaagtttgttttaatcaaatatgaatataagaagaaaggacaaaacatatgttaaaaacactaggtgcccaaataaaggaatacaaatgggcttcgattgcgacacctgttttcatgctgcttgaggtggctgtggataccataatccctcttctcatggcatcaatcatcgacaacggtgtcaatatgggcgacacaaggcatatctatatcatgggtgtgtggatgattgtcgcagcactgtttggtcttttgacaggatgtctcggtgcaaaatatggtgcaaaggccgccatgggctttggaaagaatctgcgtgctgcaatgtttcgcaacatccagaccttttcctttgcaaatatcgacagattctcatccgcgagtcttgtcacacgtatgacaaccgatgtgaccaacatccagaatgcttacatgatgctgcttcgcatggctatgagagcccctgcgtccataatatgtgcgatggctatgtcatttttcatcagccctcgccttgcgacaatatacttaatcgctgtcattgtgcttggagctttactgcttttcatcagcaaggcggccatgaaatacttcgacagagccttcaagcgctatgatgacctgaacgaaagcgtacaggaaaacgtatccgctatccgcgttgtaaaggcatacgtccgtgaggattatgagaagaaacgtttttcaaaggcagcacagaatatctacgacgtatttgtgaaggcagaaagccttgtggtatacaactctcctctcatgcagtttacagtgtatgcctgcatcctgttaataagctggctcggagctcatatggtggtaagcagcactctcactacaggtgatctgatggctcttctcacctattgcatgaatattctgatgaacctcatgatgctctcgatggtttttgtaatgatttcactctcactcgcatccgcaagacgaatcagcgaggtattaaatgaacagagcacactgcacaatcctaaggagccgctttacgatgtacctgacggaagcataagctttaagcatgtaaccttcagatattcagacaccgctgaaactccggttctgtcagatataaatctagacataaaatccggtgagaccatcggcatcataggaggaaccggaagctcgaaatcttcccttgtaaacctgataagccgtctctacgacacagacaccggctctgtaatcgtcggaggccacgatgtgcgtgagtacgacatggacactctcagaaacaaggtagctgtcgtgctccagcagaacgtgcttttctcgggcaccatactcgaaaatctgcgctggggtgacaaaaacgctaccacagatgagtgtattgaggcctgtaaaatggcatgcgccgatgactttatcgagtccttccctgacaagtacaacacctacatagaacagggcggaaccaacgtatccggtggccagaagcagcgtctgtgtatcgcaagggctctgcttaaaaagccaaggatactcatactcgatgacagtacctcggctgtagatacagcaacagattcaaaaatccgtgctgccctcgcaaaaacaataccgggaaccactaagctcatcatcgcacagcgtatctcatcagtcatggatgctgaccgtatcatcgtgatgaatgacggaaaagtggacggctttgacactcacgaaaatctgcttaaaaataatgaaatctaccgcgatgtttacgattcccagacaaacggcggaggagactttgatgaaggaggtgctgcctgatgccaggaccaagaggaccacgaggtccaaaacccaaaattaaaaatcccggtaagctttttgcgcgcctcatgggatttattttcaagaaatatttacctgcctgcataattgttgtgatatgtatctttgtcagtgtacttgcaaatgtgcagggaaccatgtttaccaaaaatttgattgatgactatatagtaccactgcttaagacaggaaatcccgactacggaccactccttgcagcaatgggaagggtcgccgtattctacggtatcggcgtcattagtacgtttgcatacagcaaaataatgatctacgtatcacagggcaccattaagaacctgcgtgttgagctcttttcccatatgcaggatctgccaatccgatactttgactcacatgcgcacggcgatatcatgtcaatttatacaaacgatatcgatacactccgccagctcatcagccagagtcttccgcagatacttaacagtgctatcactgttgtgagcgtttttgtttcaatggtcatattaaatattccgctcaccatactaactatcgtgatggtaatcgtaacaacagtcgtgacaaaaaaatttgcaggcttctccagccgctatttcctcgctcagcagcgcgacctcggcaaggttaacggcttcatcgaggaaatgctcaacggccagaaggtagtcaaggtatttacccacgagcaggaaaatattgaagccttcgacaaaataaatgatgaactctttgaaagcgcctacaatgccaacatgtactccaacatgctcggtcctgtaaacgcacagattggaaatctaagctacgtgctctgcgctcttgcaggcggtgttatggctctttcaggctttggcggtctgacccttggtaagcttgcgagctttctgacctttaacaagagctttaacatgcctatctcgcaggtcagccagcagttcaacagtatcatcatggcacttgccggatgcgaccgtatcttctcactgctcgatgaagcgcctgagactgacgagggctatgtcacactggtaaatgctaaggaagaaaatggaaaactcactgaaacacctgagcacaccggcttatgggcatggaagcatactcatcaggctgacggctctgtggactacaaaaagcttgagggcgatgtggtatttgacgatgtggattttggatatgtgcctgagaaaattgtactgcacgatgtggatctttttgcaacacccggtcagaagattgcctttgttggtaccaccggagctggaaagactaccatcactaaccttatcaaccgcttctacgatatagcagacggcaagataagatatgacggcatcaatataaacaagattaaaaaggctgatctgcgccactctcttggcattgttttgcaggatacccaccttttcacagctactgtcatggaaaacatccgctatggcaagcttgatgccacagatgatgaagtatacgcagctgcccgcctggcaaacgccgatacgtttatccgccagcttcctgacggctacaatactgtactgacaggtgacggtgcaaacctaagccagggccagcgccagcttctagccattgcgcgtgccgctatcgccgatccgcctgtgctcatcctcgatgaggctacaagctcaattgatacacgtaccgagcgtattgttcaggacggcatggataagctcatgcatggccgtactacatttgttatcgcacacaggctttctactgtcagaaacagcgactgcattatggttttggagcagggacgcattattgaaaggggaagtcatgatgagctgatttcaaagaagggaaagtattatcagctttataccggaaagactgcgtaattcacttgactaactacgaaaaccgggagaccgggaacgcagccggggggatggcacaccctcatgtgcgctaacgctttgctgttaagattctgtacgaattatgcttatagtgtttctatgcttgacgaaaccggcttttatgcgccgtccatggcgcataacaccttgcccagccatccatggctgggcatttctgtgtttcatgtgcataattctacagtatctaaacagcttcgctagtcgcttacatgagggtgtgccatccccccggctgcgttcccggtctcccggttttcttacgctgtgactagatgttcatttgtggttagctaatatttctttcatctttttgcacttcggcctaatacaattccaccatatcgcttggcattctcagatcacctctaggagataatgaaacagttcccacctttggtccgtcaggtatgcatgaacgcttaaactgctgctgcctgaaacgcgtaaagaatgtttccagagtcttttctatttcacccttacttacatttgcaaaagcaatctctgcaagttttaatatccgatcccggctttctccattacgcagaaaatgataaaggaagaagtcatgaaggtcatatttgccgatgctctcctctgttttctgtgctatgttaccgtctttatccggcggcagtagttcaggagaaataggcaggtctgctatttcgcaaagcacatttttcatttcatccgttgacgcgcactcgctggcataagcctgtacaatgtatttaacaagtgtctttggtacactgcagttcacggcataattgctcatatggtcaccgttgtaggtgcaccagccaagtgcaagctctgacatatcacctgtaccgattacaagtccgtctaccatgtttgcataatcgaataatacttgcgtacgctctctggcctgaatgttttcatatgtcacgtcaaaaacatcatccggatgtcctatatccttcatgtgctgtctgcatgcagcctcaatattaacttccacggctgtcactccaaattcttccataagcctgtcagcaattgtctttgtagtagatgtagttccaaatcctggcattgtaataccatagatatttctcttcggaatgccaagtgcttcaaatgcatcacagcataccaaaagtgcaagtgtgctgtccagaccgccggatattccaagaacaacattttttattccggtggatatgagtctctgttccagaccttttgcctgaagcgacaaaatctccatgcagcggttttttcggttgtttttatcacttggtacaaacggatacggattaactttctttggccatatttgataatccttcatccggttttcaccatttaaaattacttttatcacatccggcacatcagcccatgaatcgctgttgtatctgtggcggtcattcatgcagcgatcaatatctatctcacttatcacaaaaccagagctcatcacatcatcttctgatacctttttattcatacgttttgaataatctgacgtctcaccagctattctgccattatcagctatgatgcagtggccggaaaataccagatccgtgctgctctctcctgcaccgcttgacgcatacacgtatccggcacggcatcttcctgactgcatcgccacaagactgcgcctgtattctctttttccgattacgtcattgcttgctgatggatttataatgatatttgcaccggctttgcaaagctccccgctcggaggcgcacttacccataaatcttcacaaatctcagtaccgacaattgcgcctctcagatccttgataataatattcggagaaaaaggtactgttggcctgtttgcgacataatttaaagtaatctcatctgataatctcttgtctgcgcttgtaaaccagcgtttctcataaaattcaccatagttgggaatatatgtttttggcacaattccaacaatttctccgctgtgtacatatgcagcacagttgaaaagtctgccagcttcatcttctatcggcagtcccacgcatacaaggatgcttaaatcctgcaatgctgttttaatcctgtccagttcttgctgagcctgcgcgagcagttcttttctcaaaaacatgtctgcacagctatatcccgtaatacacagctccggaaaaaccacaagctgcacatccttttttgcaagtgactctgcaatgtgtatgatattgtcagcattgttcacgcagtccccgagataaatctcaggggacgatgcggcaacacggtaaaatcctgtattcatgacatttcctcctagcggtcatttttcatcctgtaatcaatgcagcggtttaagtaatccacataatccagatttttgcacatccccttgccgggtgtatcagaaatcttcgctacatccataccattgcatattgtggttttcatgacaatattgagtgcaggaacatctgtatcattgcttaagtatgtgccaataccgaaagctacatttgtttccttgcagaaatgtctgtagagcttgtcagcacgctcaaaatcaagactgtcgctgaataaaagtgtctttgtttttgggtcaattccaaggctcttgtaatgagcaatcatcttttcaccccactcatacgggtctccgctgtcatgacgcactcctgagaaaagtgtcgcataggtcagctggaaatcacgcaggaaacagtctgttgtgattgtgtcagtaagcgcaataccgtttaatactccatactccttgatccatgcatcgagagcataccagtttgaatatgccggattgtgcctgtgattgccctgtcctgtgcacataatccactcatgagccatggtgcctacaggtgtaagtccgtacttctttgcaagatacacatttgatgtgccgacaaactttgatgaactgtgcagggtgtcgtttaaatgtgcgaacttctgcactgcaagctcctgcgcttcagcagaaagtcttcttctgagaccaaactctgagaatgtacccgcgtaccagtgtccgttctttaaattctcatactttgcatccaaacgcttcttaaagctgtcaagcagcttatcatagtcatatgccattctgaaatacacttcatttacaatggcaagtgtcggaatctcatacattgaagtgttaagccatgttccttttgcctcgatagacaagccacaaggtgcatctgttcctatctcaaaatcctcaaaacgcggctgccagagacgaagaaaatcaacataagagcctttgatccatttgatattgtcaagatatgcaagctcatcctctgtaaaccgaagcttacagaaagccttaatctgttctgttatctcctgcaccattttctgtgtaaaatgcacatcttcatttctgcacttgaatgtccatgtggtcttgtaatccgtaaactgatggaatattgtctgacccatgctgaatttatacatatcagtctctaaaagacttgtgattatctggtttaatttcataatattctcctcccatttcttacactattagtatgtcagaaacatttttaataaatggctttctatataatattgacctgaatcattttcattgcttctattgctgtcttatgactttcaggcgttacgcaggcacaggcattttctatcactgacacctctgcatctttacagaacgtctttgcaatcgctacgttgctgattacgcatattcccgtgcagaatccgcagaaataaatctctgtatcgctgttgtcatatcccgcaagcagttcgccaagctctttgctgccaaacgtcggcttgtcaatataagtcatatcatcacagtcaactccacgctccttcattgctgctttaagacgagcgtctacttcccatccgtttgtccctttaatacagtgagctaccggaagctttcttccctcctgagtattcagatagttttcatcatgcgtatcccttgtgaatatcacgtcatcatattttcctgacctgatttcatctgcaataacatttgttgccacgttacactccttgtttccaagaactcctgtaataaagtcattctgtgcatccactactactaaaattttctttgccataatcatttcctcctacatcatataatcatcatttgttgcatccataaggatttttccaagctgctttaaatccttccacatccatcgcggaaccagatccctgactttgtcataatctttcttatacagcaaatctctgatcattgtacttgaaatctcaatatcgcttctgccaaggtttctgatggtcacattctttaaaatatcatctgtaaaccagttttccgcaatcttcgggtcgtcgttgtaatagaatgtaaagcttttctctccaatttcattagctatgttgtaatagaagaaagaaccccattcctttacatattgagctgcatcctccatgctccagtctgataatgtcataacctttacatctgcaccgcttaaatcctcttcctgcagtacgttttcaacaagtctttttctgtattcgattggaaacggatttctctttgtatagcttttgtttgcactgcctatcacaacaagcagattttcgcactccgatgcggcctgttttatcatgttcaggtgtccgttatggaatggctgtgcccttgtgagtatcacaccgtttttatatttcttatgcactttaaccagtttacgttcatccatgttaaggtcaacatatctgtacacagcagccggttttcttccgacaataggtctctgcgacctgtcaagtgaaacaagctgtcctgcaatcttctcacggaacacctttggatgaacttcctttcctgaaagaacctcaaacaccttaagcaggtccggaatggtaaactcacgcggcacaaggttaaacataatgcctgtatactcagccttattccttatcctcataagtccttccagtataatctggtcatggtcaaaagcaagcttttcgtctgatacgctgaccggaacaaagttttccactgtgattacaccatttttaaatttctcagacctgagggagtattcaattttaatcaagtcgtttgcaaactcaagtttttcatctgcaaatttcacatcgaaccatctggcatcctttgcgtcatcacccgcaacggcagactgctcatatccatatggaagcagtgcaatgtatgcaatatcaataattctcatacgagggtccctgtccggctggctcatggtatagagctgctcaagataaatgtctgtaagacctgtttcctctttaagctccctgcacgctgcttcatatgctgattcctttatgttaataaatccgcctggaagcgcccatttgtctatctccggatgagcctttctctttatcagaagcacctgcatacagcttaagtcttccttcatacgaagcaccatcatgtcaactgtaaccgatggtctgtcataatcgcccggcttatattctgctaaaaactcccgttctgttaatccatttacatctactttattcatgtgtttaactcctataattactttctgcgtttcttatatttactttatgtgcttattatagtaactcttagtaactatgtcaagtgttttatagaattaaatataatttttgcaaatttattatgcttccacaacctgtctgcaggagatgctaatatataagctcaaaaaaaggggatgtgaaaaaactcgattgagttttttcacatcctcttccattttctgtgtttcatgtgcataaatctacagtatctaaacagcttcgctatacatcaggcaatttcttcggagttacgctttatctgattcactatctccattatctgttttgcggtactcatatcatctttgaaaagagttgtgatacttccaactgatttaaatggttcacccatcaatactttattatcttcgatatttccatttgctactatatagtccactatcagatttacgaatctcatctgatttatgttcaagcgctcttctgacataaaacaactgaaggcttcgtttactgccgctctatctacaccgactatttttcgtactaatctgcctatcggtgtctctccgtattcctttatataatcttcctttgaaccaagctcagtccacagaattcgttccaattcccttagatccgtttctgtcagctttttgttgtttttcagcttatacactgacaatttgtcactatgctctttcaggtaaaattcgacttttttacgataatttttcaagtcatttccgccatataaaggttcacccggtgtaccatctgttatagagtccgtgaaatttgtatagtatattggccgtacctgtctgtcaaggtactgcaacagacctcttaaagcttctcttactgtatcaagctctattatagtgactttatcccaaaattcatttgtctggaccttttcgataatctcctttttcttttccacctgtgggattgagtatttggcagacagcttttctgcggtctgaaccactatattcaccggactttgtatgcttttgctttgcaacagtccaagatctatactgtataccagatagtcaaatcttcgcgccagctcatcttcctttttaggcctgataagaggtgcaatatgctccctgatatccgaaatctctattgtctccagattatcccacgatgatgaagccctgaaaaactctacataacgcagatgtcttttcaccataaagctatcgtcatttaagctaattacatcttcctttaaatcatccacaaggctttttctgtaatctgcgtatacctcatcactactgtataccggtgcctgaagctctctgacaatctgggcttttgtgttatatattttctcattgagtgattctgttatgccattctccgctccatttttgttcacgcggaaatattcaaaattgttacagaaatcaaatataagaaatctttctttgtccataccctctccaagcagattagggcaaagcctggttccccttccaatcatctgccagaacttggcatagctttttaccttcttaaaaaatacaagattcaaaatctccggaatatctattcctgtgtcgagcatatcaacagatactgctatctgtggcattttatcacttgtgctaaactcatctatcaatgaatcactgtactttatactataatctatccgctttatgaagtctcctccatattccggaaaaagcttattgaaacgctcgactattgcctgcgcatgcaaagagtttttggcaaaaattattgtcttgccaagcttgtctccaccctcaatttttaagcccttttccataagctctcttaaaaccttatcaattgtatccgcgttaaaaagccatgtatttacggcctctcctgatatatcatcacctacagtgtcatcatcagaaaatgtatcctcatactcctctttttcctcatctgacagctcatcatagtgaataccgctttccattatttttgacttatattccagtgtagaataattgaccagatagccctcttccaccgctttttcaagctcatacgcaaatgtcggaactcctctttcaaggtcaaagactccatatgtgtttttgtcgatttcattctttggagtggcagtcataccaagtaacatcgcatcaaaatactcaaatatttcctgatattttttgtaaatgctgcggtgtacttcatcgcagattatgagctgaaaatgccccggactaaagagcttctcaccatatttgtttttcctctcatctatggcattcatcatcgtcggatatgtagaaaaaatcatcctgcacgactcagggtcatctttattgtcaagcagattacagcatgataaatcaggaagcagattcgtataattgtttttggcctgcttcacaagagcttttctgtctgcgaggaacagaatatttttcacgtaattgtggcgccttaatacatcaacaatactaatgctcactcttgtctttcctgaacctgtggcctgcactataagcatcttacggtgcttatttgtgatagcatcacagactgcggttacagcctctttctgatacggtctgttggtaatatcatcgcttatccgtatattttcaagcggaatccttgaagtgcgtccatccatctcaagctgcagctcttcctgtgtgaaaaagcctgaaacctcacgccttggatatcccatataatcattcgtatagaaaaattcaaatccatttgttatgaaaataagagggcgtctattgtatttattctgcaaacagtcagcatacagcttcgcctgctggcttcctaccatagcatccacagaagcctttttagcctccactacagcaagtggaagattatcctttccccaaagaacataatccacataccctgttcctgtgctgtttggcattcctgtaaccggctcctcctccgtgacatttctgccaataacccatcctgcctcctttaaggcaacatctatatatctcttgcgggtttctgcctcacttatcgtatctacatggaactcccttgtctttacattctgactacgcttctttgtcatctgctcgcggagctcttcattctccttcaatacgctctcgagctttttatccttactgcttaagccctcatacagcttcatgagctcatcagcctttatacgcttttcattaccgcttgcaagaatcgactcatcatatgtcttctcatcgtattccctcgaatatgaataatcaatccaatcgcaaaactcaaacaaatcacgaagcgctattattgcttcatccctgcctatattgttgttggtatgaactgcaacatttcccagatgaatggtatatttgagcattggaaacagccttggctcaattatccttctaaacgttggctcatgaataagactcgatacattatctctgtacggaagcgaaagctccgcgtcatatgagaaaacaaacctcactgcaagctcaagtgcacgcctcgacaaaatggcacaagtggccggtgaaatggataaacttttttctgcttcaactgcctgttttgcaaaatctgcgtattcttctttctttaaaaggtaatcaaaattagtttccatgtaatcaccccttttatctttctacaagcactttgcatctttttctgcaaaatgtaattccataatacatgatattctgtcgatcatcatttaacagatattcctgatatcttctatcctttatctgtttcagagccttttcacaggatttttccatagctttaaaatcttttgtgtatttaagctctgcaataattccttcatccggatcatctgtctccacaataatatctgcaaagccctctcctgcctcaacatttgactttaccagccagtcctcattgccactcaaaattccaataagcagattatgataggagctttccttttcatcatttctcgcttttgtgtcaaaaacgctcaccgaattactcagcaccttgtttaaatacatttccattatctgtgtatttccatctttgaaagccttccaaaagtcctgcaactgatcggtattggaaaatattttattcctgaaccactcctgtatctgcagcttaaatacttctttaatctcattgtttggaattacaaggctatattttttgttctcacttatctttgtatatgtcagataacctgttgtaaacagaacactccatagattatcaatattattgtctatttcgtcataggtcatatccagacgaatttgcttgtctatggcttctcccgcgatcaaacgctcaatttcatttctggttgtcttaccagccttatctataaacctcttaacaagctcatttccgcttgtattaatccaatacgcttccggtccagccattggatcatcttttattctgtcaacatgattaattacatcccacggacaatatacatcaacatttccgaaatgataaccatcataccattcctttgtctccgcaaacctgttttccaaatgataaaatgccagcaaacgctctacttccgcatccgtaaatccaaagtgttcatcaaatcttgtatcagtaatagataaaatcttgaaattatttaatcctgtaaaaatactttcttttgaaacgcgaagacaacctgttaagacagcaaaatccaatgcctcatttgtctttaatgcttttccgaatatggcacgtatcaaagaaaccatctctttataatagccattttgaaatgccttatccagtggaacatcatattcatctattaaaataactgtttttctgcaatgatgcttatataacagctcagataaagtttgaagcgaagcatacagtgcctcatctctcatttcatatctgccatcctctaatcgaattaaagaagcatacgccgacttatcgtcaatgtccagcctgtcactctgcttcaaatatgcaaatctcttagcttcctttgcaattatctctatcatctgatactttgcagcttgaaaatcgagtccttccacattctttaaagatagaaatatcacaggatacttgcccatattatcatcacacagttttttgttgtgcgatatataaagaccatcaaataattcagaagctgctccaatttcaaagaaagatttgagcatactcatgttgagagtcttgccaaaacgacgcggtctggtaaaaaggttgacttttccccggctgtcaaccaactgttcaatcagctttgtcttatcgacatagtaatatccgtctgaacggatttcctcaaagttctctattcccaccggtagtttaagtgattcagtcatgcatgctcatctccttccctgataaaaataagtgtgtaaatataggtttattatagcatatattggggcgaaggtcatagtatcaaattttgatttgttgacttgttctgcaaacgcataatatctatcttgtacttccatcggtggcttaattatttgaaaaccagatactattggaacattaagattgggcattgtttgtcctacagccatatcttctatagttttcttaaatgatggaaacgatattattttttgaatataatcagcagtaacttcccctttagttctgataagcatgcttcctgttccacacaagaatccatcttcaggaacaactgcgcatctacccatttcacctcttctacccattacaacatccccagtttttaactgatatgctgataattcttcatatttttcatcagaaattgtaagtttatcatctggagaaaccttaccgtcaacaatatgcgaaggatttagtaacggatgtccaccatcaatataatcttccttatgtagtagcgaaccaaaaggtccaatcttaatatctgccaaatcagaaagtgcaaccttatcatatccataaggattagaaactggatcaccaaacatctcgacaaatcgggctttcgttaagctgtctaattcaactaactcttgttttctggcttctataacctttttacacctacccaaaacatctatgatttccaattgtttctctatattatcaaggttaaattcttcatttttataatctttaaaataaatatgtggaatggttgctccagtatagtatttttctaaatgcatataactcacagcataaaacaaatattctggtaatacatttttctttggtattagatactgcatagttcctatcactgaagattttgctggattcaatgttgttctgcctattcctgctccatccttgacaacagctacatatggttgctcctgatgataaaaatttacttttccagccaatcctgacgcaccataaatcgaataattaccactcattttaattatatcagactgttttatgttcgatgagccacgctcacaaacatcctcaagttttactctcatctacatcactcctgctataaacaccattaatctttccaagacacaaaaataaccgccctggtctggtaaactgtggcggttatctttaatcaatacatatatcaggctgaccgtctatcggtagcacttcttttatactatattaacatctaatcgcctttttgtctaacatgcattctatttatcaagaattttacaaacacgaattgaccttttctcatttttactaagcaagatacttctgatgagcagttttgacattattctgattaaccatagcatactgcatagtggtatcaatctgggaatgtccaagtatcttttgaacctgttcaatcggcattcccttatcaatagctctcgtagccattgaacgcctgaatttatgcggatgtactctctctaaggacagttttctcccgagttttcgcaatcgaatctcaacaccacttatcttaagtctgtcatgtggtgcatccaacgtaacaaacaaggctttatttttatcagttctggtattaatataatcctttagatgtacttttgcctttgcatcaaaatatactctgcgctctttatcaccttttccataaacgatacactcacgtccttcaagatcaatatcatctatattcaggtttaccagttcaccaactcttattccggtagaatacaaaagatctataattgccaaatctcgcttttcattacaattatctctaagcttctctattccctcatcagaaatcacgctttttacaactgttttggtctttatcttatgaatcctgcgcataggacttttaagaatataatcctcttcctcgagccaagaaaagaagcttgagatatttcttctaacattatcaattgttacattggagcaattattgagcttttgataatctgacaaatattcacgtatttcttccgttgttattttacggacagatgtttcggtttgtgacaacagatgctgcactgtttccctataatactttattgttcgttctgaacacccctctatagtttttgcatcaagaaacatttccaaaaatttatcatttgcaatctctgctttctctgcttcattttctgcaaacgtttgtaaaatgacttcctgtaattttttcatctgagctattgataaatactccgacattacatttaaaactttaactattttttcttccatgttgatatctcctttcaaaataccaacatccttctcctgcataaatgcaatttattccggcaattgtatttatgcagcctgtgaataatccataataaaaattttacttgcgatatgctctactatagccaatcctgttctattttcttctctaattgtataaacatatcataatacttttctttggtttgacgtataatatccattgcaattgcctgattatatgcgtgtgcaacattatttctcgaaaccaatgcatccagccataattcttcatcactaatcattcctgccttgtaagctgtttttaaaattgttcttggcgatcctgttgcaccctccgcataaccaaaattctctaatagttctttcatcgccttccatgattgttcaaaacagatttcatataatccaaccatgccagcaatttccacatttccatatggttctttataagaaaaaatatcgtttaaattgactaatgctgccttaaaattctcaaattttttcatatagcactaccccctctctttttattgattccaacaattcttttcttacaggcttatccaagtccactatatcaaattccaacaacgttgaagttgtttcatctacatccaaaataaaatgactactgctaccaccgcaaaatgccaaatctatatcacttcgctctttaaaatctcctcgcgctcttgaaccaaaaagaattactttttcaacacaattcttcttcgctagctggataatttcctgtaatactttacattttattcctgttttttcaaaggtactatttacatccataaaggctcctatattacttcgtttcttatccaaaatatttctgcattaaactatcaaacaatatttgtgtttcatccaatgctttctgaactgcaacttttgatttgttgacttggtggacaaatctaataaattctttttgtaattcaatcggcggaatgacctgcttgtacgctttcataattgcagtgtttaaatttggttgtgttccagccggagcaattgccctgaaatgttctgtcatctgatttaatgcttgtaacaaaaatactttatcaagtcttttgtctatatcttccattgcaagccatccatcgtgaatgcatccatcaaaagtgataattctcgcaaaacctaatgaaactccacagtttgcaaatattaaactaccttcttttacaagtctactattctttaccccttctttaatgatgtgttcctttgtcgaactcaaatatatattgtcagcttccgtagcatctccgatttttatccacggaacatcaccacctaagaatttttctataggtcttggtgatcctcctctaacaatagtgcaaagatttcctaaaaattcacactcccaatttttatcattaatattaatatcaccaaagacctcgacaaatcgggctttgatgaggtcatctaaattagaaagttctattttccttttttctataatacactcaagtttctctaagacagctataattttatcttgctttattagctctggacattcaatgtctaattttgataaatcctctttattaaatccagcctgtgccgctcttgaaccaacattcaatattgcattctgaaaatatggtgacttcaaataataatacaaatatagcttttttattctactcgtatccggaatcgttcgcattattgccacattatatgctccggcaagtcctgtaaggatctttccaatagacgctccatatctggcaattaaaatatcatttgcctcacacatttttgtagtattacttatttttatatattctggtgtcactctttcaccttgagtaaaatctcgtatttggagcatacgaatatatccctcctgctcatcaaatgaccactcttcttttggcggttgtgaaccaccttgaaaatcacatatatccgttaatttcactttttccatctacatttccctacaaacacgaatttgcttttacacatccaacagtttcttaagctctgccagttcaccctgtatctcactttccagagcgtctatctttcctattatcacatcggttggctcatattgcacagcctcatagactatttccttgtacttattgattgaaaggtcataatcatttgacacaatctcatcaacaggaacaaagaagctctgatccgttctttttctgtcagtctctgcatcaagatgattgaatctctcaataatatctgggatatcattgtctgcgatttcctggcgtttgtcatcaaggcttaatccatcagctttcatatcataaaaccatactttgtcggtatcacttgagcctgtttttgtaaaaataaggattgctgttgacactcctgcgtatggcttaaacactccacttggcattgatatgactgcgtcgagcttattgttttctatgatttcttttctgatttgtttatgtgctttactgctgccaaacaatactccatcaggaacaatcactgccgctctgccaccttttttgagtatacgcaaaaatagtgctaagaaaagtagctctgttttcttcgtctttgtcactttaagcaaatctgctgaaaccgcctcatagtccagacttcccttaaacggcggatttgccagaactaagctgtatttttcaacatccgtattctgctctgaaagactgtccctgtacgaaatattaggattttccacgccatgaagcagcatattcatagctccgattcgaagcatagttctatccatatcattgccataaaacatcgtgttattgaaatgctcaaggctctccttgtgaaggaaaagctccggatggttttctcttagataactctgtgcttctatcagaaagcctgcacttcccattgccggatcaattattgtatcatccggtgacggttttaccagttcgaccatcatttttatgatatgtcgcggtgttctgaactgtccattggttccggctgttgcaacctttgagagaagatactcgtataaatctcccttagaatcttcatctcccagctcaagcttatctattccatcgactatttttgacagcattgccgcggtaggaatcttgaatatggcatctcccatatatctggcatatgccgaatctccgtcctgatgcagattctttataaacggaaatacaccatttaagacaagctcatacatttcctctgctgaaccgagatttttaaatttgctccagcggtatttctgacattcacccggaaacatagactcatagtctacaccgagaaaatttgcctcgttttcttttgttgtctcaacttcgtcaagctgctttataaagagtaaatatgtaaactgttctataacatctaatggatttgtgatgccacctgtccagaatgtttcccatattttatctattttatttcttaattctccggtaatcattatctgcttctcctctattcttcctctttaatcacctttaggaaacgcttgacctccgcccatgcacgcttggactcaggaaaattgagatatcccatctggaacacatgaaacatcccctcatacactgacagtcgcaccttaacgccctggattcttgcctttgcagcggcctctaccgagtcagataagagcatctctatcgagcctacctgtatgagcattggtggaaagcctctgaaattaccaaacagcggcgatatgtatggatccattttatcgtggtcaccgggatagtcattcacgtagattagactgtcccttgtgttcccaaacagtgggtccttttcgtagtttgtctcatatgactctcctcctgctgtgaggtctgtccatggtgacatggctactattcctgccggaagcggcatgtcgtggtcacgaagatacatggtgaggcacattgcaaggcctccgcccgctgagtctcctgccagcacaatctgcgagccaaaccagccctgtgacaagagccatttatagcaggctatggcatcctcaagtgctgccggatacgggtgctccggcgccacgcgatagtcaggcgtgagcactgagcagccctcacttacctcattataaaggcctgcaaatacatagtatgcattgcgcactgcccccatatatccaccaccatgcagctgcagtatcacacgctctgtatttgggttttcctttgaagataaaagcttcatagtgaaaccgcccatatctatatcctctgttacaaagcagtccggaacaagccatgcaggttccttcatgcgcttcctgagctctccggattttatttttttgccgattgcaaggtcatttgtgatatgtcccatcagattagcaagtatttttccctgtatactgacttcttcatctgccacagctgcattgctatggactttttccgcatgctcacttttcatggcagataatgaattcttaaacgtcttttcaagcttattacccaaagctcctattattccagtttcattatcaccattactatcgccgttttcaatttccggatggtagtttcccatctcttcatcctcaaacatatgcgaatttcctattccatgaaagcctatcatatatgaaatctccgtttcagctctgttctggctcttttgtcaccgataatcagtgttccgagaaacaaaaacagcgatgcgcccatcgctcccattgccagatatgggaaccatatgatcttgactgccacaagtatcatcgcaatcacgctcatcagcacaagaaaaagctgcatcatcatgtagctctgccagtttcttatgtttactatcataagtataattgttgcaagaaccatcgccagtatggcacttgggaaaacaaatgtaagtgcccagccactggctcctgtgagcaggtctatgccctcgagaaacagcaccgtgaacacaaatgtgcttacaattttaaatatatatccgtttcttccgactattgccagacgcagcgtcacattcgcatagattacaacaagaagcactataaagctccagtttatctcattgtctgtcatgtaatcaacagttgtcagcacaatctgtcctactatagacagaaacaatatgatattttccagcaatctgtattttcttgatgcgcccttgacgtcaggatatctcgtaccgttgtcatggcttgctgtactatctgccctctttgctgcactatctgtatcgtttacgcacttatccggcacatcattatgctgttcaaaaacccattcagtgccctgatgattgtccgatgacagttcaaccggtgccacaacctgctggcagagcgggcatttatctgtattgtctgcaatatacacaccgcatttcatgcatttagtcataatactctccatttgtctcaattgtcacttccactccgtcatttacaagcttcttaaaaaagcttctctgaatcatcgtatcggccagaatagatgagaaagtaaacaccagcgtgtccttgtaggagcatatggtgcccttcataggctgtcccttggacattggtataaaggaataaaagcctgttatatacggctcgtattccggctccacctttatatttccaatattggtgatagtggtggtgtttgccagtgccgactgcgtatagaccgccttcattgccagattttttataaaaagaggcaccggtctcatcaggatatttttctgatttgacacactgtatgagaaaagatcctccagatgctccttcgaaatctgtgaattgatggaatccgtcactattttaagcacctcctcaaatgtgtaggagctgttttgcggtctgaactcagcagatatcatgacaaaaaagttctttgtggtcacggagtcaaaataaggacgaagattcacaggaactgcaaccctgacaggcatatcgtttggcatgccgtgaaaacactcctgatacacactccacacaaagcatgctaccagataatcatttatggaaactccatagcggtggcagacctgcttcagctgtgatacaggcatcatgccatgtatcagcccaaactctccatcaggtaccttttccagctttaaaagatacgccttctgcctgttaaagccacttggcttacttgatttatagttctttacaaagctgtcctctctatttaaggatgtgccctgcgtcaatgaatcgccctttagctttgcaatctccggatgtgtgagacgcagatactggtaggtgagctccctaaggaaattgatgccgcccatgccatctgtcaacacatgaaatacctcaagatttattctgttcttatagtatgtcaccctgaaaagatagctgtgattcttgttcggtcttataaatctgcacggaaatgtattttcctcatgcacctttggtgcctttttgccattttcctcaaaatagttccagaatactcccatcctgagtctcacattaaacagaccaaacttcggaagcactatatccagtgcctcctgcagcttttcactgtcaatctcatcagttaaggtgactgagatcctatatacatttgtcatgctctcccccgctatactagggaacagatttgctgtgttgtccagcttgtcccagcggattgaacgcgttttcgacattttaaattcctcgcttaatataatgatatagcgaagcagcaccctaatcgagcctgccgtacacctccatcggcacatatgcctttatctgtatcccatcagccacatattcctccgacacaagctcgccctgttttctgatgagctgtatcacgccagccttatcatatgggataattctctcaatatataccttgttctctcttaatatctcctctaaaagagattttacctcatctaatcccaggtcctttgccgctgaaatgttaagagtataatctgccctgaaatcatgcagcggttcgttgtctgtgcgggcatcctgcttattaaaaagtgtgacaaatttcttgtcttttacaccaagatcatccaatgtctggtaggttatgaacatctgcttttctcgctgcatatttgatgcgtccaccacatggaaaatgatgtcagcgtactttgcctcctcaagggtgctcttgaaggcctctatcagatgatgcggcagctttctgataaacccgaccgtatcagttaaaagcacctgctgcttgccatcaagcgcaagaatacgcgttgtaggatcaagcgttgcaaagagcttatcctcctcaagcacatctgcctctgtcaggtgatttaacagcgtggacttacctgcgttagtatatcctactatcgcaacaaccggtactttatttttttcacgctttgcccttgtgatatctctgtgcttctgcacctctttcagctctcttcgaagctgtgctatcctgtcatttataagacgacggtctacctcaagctttttctctccgggacctcttgttcctattccaccgccaagccttgacatggactttcccagtcccgacaaacggcttaatctgtacttaagctgagcaagctcaacctgtatcttaccctcacttgttgtggctcttgatgcaaaaatatcaagaataacaagtgtcctgtccataacctttgtgtcaaggtacatctccagatttttctgctgtgcaggactcagctcatcatcgcacacgatgcctgttgcccctgtactctccacaagctctgcaatctctgccaccttgccggtgccgacatacgtgcccggatgaattttttctcttctttggataagtgtgcctacaactgtcgcacctgctgtctttaccagctccgcaagctctgaaagtgaatcatctgcatcatcaccgtcctgctcgcttactccgacgagcactactctctcctcaatatcctctatcttaatagtatctgccataatctatctggtctccaaaaactgatattctcttgctgcatcctcgtcatcaggataatccttcatgtattcctccattttgctctttgctgtggcaaaatcgccggaatactcatatgctataatcatagcctttgttatctgctgcttattcggcacactttcaagttcaagtgcgttctgaaaataaataatcgcagtgtcatagttaccattgtccatctgcgcctgtcccatattcatcagctcatacgaatctgcctcaccgctgtccaggtatttcttaaaatacttctgcgagctgtcattgtcgccctgcttctgatatacctcacccatatagtagtttgccttgacaagcttctcatcaacagcctttttcagactctttattgctgaatcataatctccgagcatggtgtatatacggcctctctgcatatagtcatcagcagtttttgccttaagctttaaggcattatccaggtattcctttccctggtcattcatgccatactttgacaaggtctcataaacgccaagatagagctcataattatcattattctcactgagcgccgtcttaaaatccttcaagcccttgtctgaatcattcttggcaaaatatatacatcctctcagatagtatgcgtcagaatccttattatagtcgataatagccgtatatgtatcaatcgcgccatccacgtcaccgcttaaatactgtgcctttgccttataataacatatgtcaagctcctctgcgcctactgatcccaccgactggtccagtgccttctgaaaagcatcgaccgcatcatcatagctgccgttttctatacagttgatgccatactgtctgtacgcatccttgtcctttgccttgtcgccggaaccacagccggtaagcatgcctgctgtgagcactacggtaagcgtgagtgccataaatttattctttatcataatagttctccatgtgtatattcttcctcttattatatatgtatttgccaaacttgtaaatcccgcccttacatttctgctagggcccgcagttcacggtgaggcaggaccggtgacgtatacactctcgtgagtgctacgctgcgctgccaagatactgtaggaattatgccttgtaggctttctatgctcgacgaaaccgtcgaaactcgccttccatggctcgatttctccttgccccggcatccatgccgggccatttctgtgttgcatgggcataattcaacagtatctaggtagcttcgctattcgctttcacaagagtgtatacgtcaccggtcctaccccaccgtgaactgcggattatgagattgtaagctgagattatacgttttatatgcgtggtggaggatacaccgtcccgcgagtgctacgctgcgctgccaagatactgtatgaattatgccttgcaggctttctatgctcgacgaaaccgtcgaaactcgccttccatggctcgatttctccttgccccggcgtccatgccgggccatttctgtgttgcatgggcataattcaacagtgtctagacagcttcgctattcgctctcacgagactgtgtatcccccaccacgcccacaaacctcactttcccataaaaaatataagtatcggtaagtagtgcaacacatcatctcacatctcttcacaacatagtaagacgtaagcaccggccaccggtgcgcacacgtcaccacacacattttgccacaacgtaagggacgtaagcgcaggggacagcgtgcacacatactcttgcgagagcgcatagcgaagctgcctagtgtctgtaggattatgcttagaaccacagaaatgcaccgccatggacggcggggcaaggcgttatgcgccacggacggcgcataaaagccggtttcgtcagcctgcgaaacactccgggcataatccgtacagacacttggcagcgtagcgtagcgaacgcaagagtatgtatgcacgctgtcccctgcgcttacgtcccgtactctatcaaaaaaaaagaacccccgcgggatgcacccgcaggagttcttaagcccaatttgtatttaaaggaggaagaaaaattctaagcctctaaatgccagatttcatcattgtactgcttgattgttctgtcagaagagaagaaaccagccttgctgatgttgacaagcatcttcttagcccaagccttcttatcctcataatcagcgtaagccttctcttttgtcttgcagtaatcctcaaagtctgggaatgtcatgaaccagtctttgttgaggagctcgttgtaaagtctctctaagttctccttagagccaaccttcatcatctcatcacttacaaggaagtcaacagccttctttaagtctgcatccttgtcatagtaatccttagagcagtagtcgcccctctcatatctgtcgataacagtctgtgaatcctcaccgaatacatagatgttctcatcgccaacaagctcagctatctctacgtttgctccgtcacttgttccaagtgtaatagcaccgttaagcatgaacttcatgtttcctgttcctgatgcctccttagaagcaagggaaatctgctctgaaatatttgcagccgggaataatttctcagctaatgttacgttgtagttctcaaccatgaataccttaaggtatggacttacctcaggatcattgttgataatctgctgtaagcagaggattgcatgaatgatatcctttgcaatgatatatgcaggagctgcctttgcaccgaagaagcatgtgattggtgtagatggcttcttgcctgccttgatctcaaagtacttacggatgatgtaaagcacgttgagctgctgtctcttgtactcgtgaagtctcttaacctggatatcaaagattgaattgtcaggtacgtcgagattctgagtcttctttaagtaagaagcaagctctgtcttctttgcgttcttgatgtcaacaagctttgtgagaacagtgtcatcattgatgaaattgccaagcttctctaactcgtttgcatccttcttccagccgtcaccgataagctctgtgatgtatgctgaaagctccgggttacaagacattaaccaacgacggaatgtgataccgtttgtcttgttgttgaacttctcaggatataacttgtagaagttgttgagctctgtattctttaaaatctctgtgtggaggtatgcaacaccgtttacagaatatccgaaatgaatatccatgtgtgccatgtgtacaagaccatccttgataatgtatgtgctctcgtcagctacctttgcgcgaaccttgttgtcaagctcacggatgattggcataagctgtggaactgccttctccaagaagctgattggccatttctcaagagcctctgcaaggattgtgtggttagtgtatgcacaaacctttgatacaatctcaatagcctcatccatcaggatgcccttctcctgaaggagacggataagctctggaataaccattgatggatgtgtatcgttaatctgaactgctgcataatcagcaaggtcatgtaaattagagccctttgcctctgcctctgcaaggataagtcttgctgcgtttgataccatgaaatactgctggtatacacgaaggagacgtcccttatcatctgaatcatcaggatataagaataatgtaaggttcttcttgatatcatccttgtcgaaatcaattgtgtcgcctacgattgactcatcaactgactcgatgtcgaataagtgaagctttgttgtacggttgttgtatccaactacgtcgatatcgtaaagtcttgactgtactgtgaatccgccaaagcttacaggatatgtgatatctgtctttgtaagccagctctcctttgtaatccatggatttggagtctccttctggagattgttctcaaatacctgcttgaataatccgtagtggtagttgaggcctacaccgtctccgttgagcccgagtgttgcgattgaatctatgaagcatgctgcaagacgtccaagtccgccatttccaagtgaaggctcaagctcgatttcctcgatttcagcaagtgactttccgttcttctcaagagtctctttaacttcatcgtagatgcctaagttgataaggttgtttgataaaagctttccgataaggaactctgctgagatgtagtagagctttttctttcctttgtttgaaacctttttctctgccttgtcttttacaagctcaagtaatgcgtagtatacttcctcgtctgtactaacgctgattcccttctgaagctttgtttcgatttcctgcatgattgccattttgatttcctcccaaatctgttatcatgtgtacacgccaatgtgtcaaattaactaattttcatttagcgtgcttaacttccttgtgtcatttgatgaatcaagtataatccattacactgcacaattcttgcaatatacagtcgaaaacttgcacaatcctatcatttttcggtatttttagtggcttttcaagaaataatatgctaaaatatcatcatgaatatattagaatatgaaaattatcacgaagccaaaacacatgtggagcttacgttcccatacaatacctacctgtgctctattcctcttgatttttccggagttccgctgcactggcatgatgacatggagcttatctatataaagaagggctgcggtcatatatctgtggattttaaggagtaccatgtcacagcgccaagccttgtgctgattctgccgggacagcttcactctatagaccaatatatggatgaatcgatggagtacgaaaatatcatattttccctgtcgatgctgcttcccggaaagtacgattacaccaaggaggattttcttacacctctcttagccggcagattcacagttccgacggtttttacaccggtgtatccatactacgaggatgtcgtggctccaatagatgcatgcgatgagatttgcaagacgatgccgcagggctatcagctttatataaagagcaagctctacgaattcttttttgtgcttgataaccgctgccgtaatctgacaaagccactaaaaagcaaaaagactcttgataagatgaaggttgtgctcaaatatgtggaaaataattatgccgacaaaatctctatcgctgatatcgctgatgtagccgggttttccgagtctcattttatgaggtattttaaagaaaccatgggcacatcgtttgttgactatttaaaggactaccgcctgaccatggctgcgagacttttgcaaagctcagacagctcggtgctttctatttccggtgaagtggggtttgaaagcctgtcgtattttaacagagccttcaaaaagcactatggcatgacacctctgcagtaccgcaagggcagttgacaccactctagacagttacaatacaatatttcataaataaacgatggaaaataatcatgaaaaaaaatacatacataaaaatgactgccccattccgtgaaaataacagggcagcccgaaagcttgaattaatcaataaaatatgcacttatttagtttttatcacataccctgtatacgtgctgtatctgtgctttacagccggtcatatgcttgcactctcaatcattgctccgcttatcggctttattgcagtatctgttttcagatatatcgtaaacagaccacgtccatacgaaaaatttgatatgccgcctgtcattccaaaggataccctcggaaggtcttttcctagcaggcatgttttttctgcatttataattgcatttactgttttaatatactcacctgctgcttcgcctttatggttcatcggcattgtgcttacagtccttgcagctatcattgcctgtgtccgcgtgatatcaggtgtgcattttatcagcgacgttgttggtgcttttgtttttgcagccattgaagcatatatagtgactgttttctttttataaatagctattaattgttgtttccaccatcaacactcttttttacggcgtttccggcatcatctacggcatcctttgcgccgtctattacatccttgccggcatcgcctgctccgtctatcacatcttttccggcattgcccgctccgtctatcacatcttttccggcatcgcctgctccgtctatcacatccttgccggcatttccggcgccatctatgatatccttgccggctttaccggcatcgtcggcggcagagccacctctttgtgtattttcaaccattgaggtgtctgccacattactattgtttccacaggctgcaaaagcgcttgcagcagcgagtatcaggcaaagtgccaataaatatttcattttcttcattgtatcagtctccttttcgttttggagatagtatgggcaatttttcgtaatttatacatcattcgtaactattctgaaccactgagaacaaaaaagctaatgcgtcatgcatgtaagcggcagtttttcttgttctcagctctttaacttgggtttcgtgatgagtgccgcgatatacgaaaagataagtgctgccgatactccgacggcacaagccttaaagccgcccttaaacaggcctataaagccctcgctgtccactgcctccttcacacccttccacagtacattgccaaagcccaaaagcggtacgttggcaccggcacctgcccactttgaaaatggcccgtatatgcctacggcgccaagaaacgctcccgtgcacacgagcattaccataattctgcccggcatgagctttgttttttccattaaaatctgtacgatggcgcagatgataccgccaaccacaaatgcttttacataatccattatatccttacgcctttcttctatttttgaacgtgcagcccatccctcaaaaacggctcgttcaccctattatatattgtgaagccatcagcttcaaattacaacttcacattacagcttcaagcaccacaccgtgtgcaattcccggtactgactcgccctcgttgaagctgacaggcgaaagaagtgctcctgtcggcacaaatagtatacgcttcaattcaccacttcttagctttggcaggtaatatgccgacaaaacagttgccgagcacgcacagcccgaaccacctgagcccgtgttctggttcgttgcatcaaacatcttcataccacagtcctcgtgatttttgcttatgtccacgcctttttgcctgcacaggtcaatcagtatcttctgtccgacgcttccaaggtctcctgtcactatcctgtcataatatgaagcctctctgccaaaatcactcaggtgatttactatcagctcacaggccgcaggtgccatggcagcgcccatgttcatggcatcctttatgccatagtccaccacaactcctgttgtgattccctcaatctgtaccttccttgatatactatctgcattgtcacacccgtcctgtatctcattaccacctgctccactgcccacaataaatgctgcacttcctgtgactgtccacgtcgctgacaccggtctttgattggcgtactggttagggaagcgaaactgcttttcggcactgccaaagtgactcgatgtcactgccaccgcatgccttgcataccctgctgccacaaatgccgcggcaagtgagagcgactccccgcatgtggagcatgctccatacactccaaaccacggaatacggaagttttccacaccaaaggttgtggccatagactgtccgagcagatctcctgcaaatacatagtccatgtcggatgcatccagatgtgcttttccaagggccattgtgagtgcatcgcgctgcatggagctttccgccttttcccacgtattctgcccaaacctgtcatctttgcctacaatatcaaacagaccaccaagcggtccgtccgcctcctttgtgcctacaaccgaactgctttccaatataaaaggagcctccgtaaaacggagactccactttcccaatttttgctgcataccgactctccttactcttaatctcatcaaatcatagattcaattaatgtcagtatgcacaaacatataaaatatattcattcagatataacagctctatttaccatcatatgacacaactgcgtccacatcatacttgctaagaagctttctgccattaagacctgcaagctcaataaggaaaagcatcttcacaacctctcctccaagctcctcaacaagctctgctgctgcctgcattgtgcctcctgtggcgatgagatcatccacgagaaccactttctgacccggctttattgagtccttgtgcatctcaattgttgctgtgccatactcaaggtcatatgtctttgatacagtctcacatggcagtttgcccgcttttctcaccatgacaaacggcttatgaagcgcatatgctatcggcatgccaaaaacaaagccccttgattctgctcctgctatcacatcaaaatcaagtccgtcaagcctctttatcatctcgtcaattgcaagctttaatccatctgcatcctggataacacttgtcacatcacggaacatgatgcccttctccgggaaatccgggatagttctgatatagtcctttactgttttcattgtatgtaccttccttatgtgtatttaatatgtatttacatatatattcgtaatgcatttgtccttttgtatgcattaccattttactctcttgtgacgccatatgcaaatcaaaatcacttcaccttatgatacccgtctatgcactccacgacatccactatctctatcgtgccggcatgtgaatcagccacaaagcgtatatcaaatttgccgtatctcatgccatagatataatccctggccttgttgtatgcagctcttggatcctgtgccagaatatgctccacagtaatgcgggtgtcttcatccatacagcttttgagtgcctcatcgcgccagataacatgcaccgtatcccatctgtgctctgcggcaaagccatctgatgccttaggatgtgagtctgcatatgccagatacggctttatatcatagattggtgtgccgtcaagcatatctacacctgacacatgaattatggggcccttgctgtttttgtactcaaccctatcaagccttacagaggatagtcccatgccgtttgggcgaaacggcgaacgtgtggcaaaaacacctctcttttcccggcctccaagcctgggtggtgtgacgagcggtgtaaatttctccaccctgttttcggaaaaaccccatataatccacaaatgtgtgaactcctctattccacgaagcgcatcggggttttggtattttggttcaaatactatctgccctgctgcctcaggcacaaggccgctctgccttggaatgccaaatttctctccaaatccggtgtgcataatcgcaaccggctctatagtcttctcatacatatttttataccagtattttattcagtatatcatcctcgagcacaagcttctttgccgcatcgcgatactccttctcatgcagatatgtgtgcctgaacggcttcatggatggcgccatatctatcgcatccagaaaatcctgctttctcatgccaagagtggccgcatagtcgaaaaagcctgtccttttgagcactgtgcacacccttacatatctgtggttctgcactacactcatgatataggttgctatgccgacctgtatgccatgaagctgtggatgctcaagaattttgtcaagcgcatgtgaaataagatgctcactgccgctggtcggcgcactgcttcccgctatctcgtttgctatgccgctcatggcaagcgaatccacgagttcctttaggaaaagctcatcctttatgctctcataaggtgtacgcacaaaactgttgaccgcctttttagcgaccatcacggcaaagtcattgaccacgcctgcaccatgtgcttcctcaaaaatccagtcatagagtgctgtaatctttgacaccatatccccgatgcctgaatatataaacttctccggtgctgtgcggatgacctgtgtgtcaactatgataccatgcgcaagctttgcaggaaccgacgtacgcttgccgtgcaccaaaagtgatgcactggcgctagaaaaaccatcgcttgagcttgaggtcggcacactgataaatggcatatttcttagaaaagctgcatattttcctgcatctattacctttccgccgcccactgacacaactgcctttgccttgtttggtatatcaaaagcaagggtaatgatatcgtctatctcaaccgtatcaagctcgctgtactctagcactgtgataccggcatcagtaagcgacttcattatagtatctccaaacatatctatgagaccgtttcccataaaaatgactacgctcgtcagctcctcactctttaaatactctccgattttgtttaatgttccatttcccaccttgaggattgatggaatggatattgcttttcctgtctgcattttcattctcctctttttatttaatatgccggactatcattgctttgcatcataaattgtcgcactgtagccctgttttttcttgctgtcatacatggcggtgtctgcccttctgtagagctggtcaaacgtgatacaatccattccgtcataaaagcatgcgccaagactgagcaatatatgctttccattcatctctgctatatcaatatgctctatgtttgaaaaaagcctgtcaaaaaaagcttctgcccgctctttatcaagcatccccggtataaataccgcaaactcatccccgcccaggcgaagcacgacatcatcatcacgacatgatttgcgcagagtatcagcaattgctattatcaccttgtcgcccactgcatgtccataggtgtcgtttattgacttaaacttgtcacaatccaaaagacaaagcagaccgcactgtttgctgacgagatactctgttatcttattctctccacttccgcggttgcgtatacctgtcatcaaatcaatctgtgccagatacataagcctgtcttcacgtcgcttttcctcgtcaatattctccacgcagtaaagcacatgccacagcctgccatctgcatcatagtctacaagaataaacctttcacggcaccagcctgatacctttccgataaactcgtgcactatggtattttttccacgaagtctgtcctctacagtactgatatccacaaactccagagcctctttgcgctgtgccttagtacagaactcattcatcacactgtttatatgccccgggaaatcctcatctatcctatattccccctcactttgcggttttacccccatgaagtgtacaacctcatccaaagtctttactatatggtatctgtgtgtctgcacatttaccagtgccatggatatatagatacttgaaagtgatgaatagctgctaagcatcgcttccttattcgactttgtgaaggaattgcgcagcttaagcaatgatataagcaaggttcctatcatatctaggaacgtggtcagtccgagagtatcactttccggtggattatccacaccgaaaaagccctttatctcatccttgtagcggattggacataccaccaggttctttacattttgcgcctttaacagattataggagaccttgtgctcatcctttatctgctctatatctgtgataattacattcctgtccttgtcaaaggtctgataccaccagcctattatgtccatatcgacattctgcaattcatgtatctccggcactattccatccgcacaccactcatatgtatttttggtgacatgcttctcatcacagtcctcaaatatatatatgcggtcagaaccgatatgttttccgaaaaatctgataaactcattaatctgctcatccggtgtatcatagttgagtgcagatctgagtgcctcatttataacaagctcgtattttataattgtcttcataccttctgcatcctcgtattgttacttgtatattactcgtattattcaaaaccaccacacacattcgcaaaactgcacgatgtccgcgcttaacaacattataccaaattttttcaaaaatgcacataaatcatggtattcttaccattatttttttctctttattttcaatcatcgtaagcacaggaatgtgcttctttctgagtgcacgtataaccggatatgtctcaaatgcgtttccttccacatacacagcctccggtctgtactttacaatctgcttcacctgctcctttacatatgccttccactgcggcttctccatcagcacctctgcatatgctgtctcactgtcaagctctgttaattcaagctgcggaacaggcattgcatcaacatgacagatatgcacgccctttatgcctcgtgcttttgcaacattcataagcagctcgtctgtctgactgtcacatgccttcgctgcagtatctcctttactgccataccatactatcacagagctgtctttatgaagagaaagcgccttttcgcatgcctttacagcttcgtcctgctccttaacagtcatgataaagcctcccttgtgacagaatatcgcaccgggaattcctgtagcatttaccagctcctcaccttcaagccccagccactctgccggaaaagaacacttgtaattcatcgagtattctcttttctgcggctgtatacaaaagccgcctctgtttgacggaaaaataacaaacgcgatatccgtctcactcagagccttctgacacgggataaactcaggaagcaccagtattctacttgccggatcgtgctttgcaagcacctcctccactctcttatcggctctctcattgccacggtatctctcaaatttgttttccagtatcatgcctgccacgcttaccgcctgaaagaaagcctcatcgctgccaccctcataatcccatgacggattgaaattgcctataagtgttgcaagctcgtttttctcacctgtattgtcattgttgtcgagaggctggacaaatgactcatcaaatttcaacgcaagctcctcgcctagaatatccgctccaacagcctcccacaacaggccaaatgccgcatacggcacaccgttttccctgattctgctgtccttctggtgatggtcaaactcaccacgccctatatcaaaaactattcctgtgaaatcatcaggcacactgttgccccttgttatgctgatctcagggtttatatacaaaagcagggctgatgagaacacatcatctgcgtgaaatttgccgccatgtgtaaaggcacaggcatccttttgttttatctgctctattaatctgctcattttttaacctcatatgtattcttttacgttgcgataccttataactctttaatcataattgtaatactcaaaatgtcaatataattgatgctaaaacatcagttgacataaagggttgtctgtattactatatataatacaaacaatacaattatatcacttacaagttttgtcagattacagcctgctcataaatattgatgcatttcaaacaggctatgacatataaacattaagatacaggaggttcacatgataatagaactcgacatgtcaagcagcaccccgatatacgtacagcttagaaaccagattgtaaagggaataggcaaaggtgagctaaagaccggcgaaaagcttccaaccgtgcgccagctggcaagcgatgccggtgtaaacacaatgacggtcaataaagcctatcagattttgaaaaatgagggatttatccgcacagacagacggctcggcgcttttgtgtccgaatccatcgcagatgataccgatttcactgaaaagctggaatcagagcttgagcttttaagtgctgaagcctgtctcaccggaatgagccgcgaggaatttttatcaatgtgcgataaaatgtattcacaaatgaaaccatgcaccgcttagcagaggaggctgactatggaaattatcatgtttattatctttatagttacaaacctttttatcatactatgtatgcaatttgcgtacacacacgcctataaatatgaaaatggcatgtatctcaatgtacatattccatcatctcacaaagaagatgccgaagtcaccgaaatcgtcaccaccggaaaacgcaaaatgaaacactttcagattgccaatgtgattatctccattgcgatatgctttattgtttttattaacattgccgtttttgttctggtatatattgtctggatgtttgcatatatatttggaatcattcatattccaaacaactcccaccggaaaatgtatgctctgaaaaaacaaaacggatggataatagaagcccaacgcaaaaaggtttatatcgacacccgcgtttcagcagaagccggtgccacgacagtcagctataaatggcacgcactctttttaattactgagcttgcagcatatataccatactttatgcttggtgacacccattacaatatccttattatttcgctgtttttgtgctctgttttaatatccacactttcgctggtatttcatgcttttataaacaaaagcgagcgccacgtatacagcatggattcaaagctcaaccttattgtcaacaatactatgaaaaaatataaaagcatcgcaatgcttctcctaagcggactaaacgctgttgcatggatttatgtagccttatacacaggtatcaccggaatacttccggcatcatcctattatgtgtatattttcattcagttaatagccgttttgggatttattgttacaatttatatgggcttaaacagaaagaaggaactgctgtctgccaacacctcaccaatagatgtggacgatgatgaatactggaaaaccggctactactataatcccgccgacaaacatattctcattgaaaaccgcatgcagtccggcaactacacgtttaattatgctaaaaaaggcgcgtggattttcacaggaatcacctgtgcaataatagccggctgtatcatcctggtgtttgtctgcatgcttcctttgattaatatacaggaaaaaatcactctgacaaacaataaccttactatttctgccggtggctatacaagcgagattgatgtaaatgacatcacagagcttaagcttctggacgagctgccggatgacagtttcctgcgtacaaacggagcctctacaaacagctatgatatcggcaggtatgaaggacgcacccttggaaaatgcagcctgtatgtattcgacggatactctcctattctcatgataaaatcggatgatacactggtgtttgttaattctaaggaagatggtgagatagaggggttgtatgaagaattaagtcaataaatttgttctttttatgttatactgtaatcgtatacctaaaaagaaagcaggcaagatctatgaaaacacgacaagaagcattagactacggcttatcatttccaaatgcatatcaggaggccccattccacgacccaaactggcagctagtccgcgtaaaggacagcaaaaaggctttcctgtggacctatgagcgcaatggttttatcaacttaaatgtcaaggtatctcctgcctggcgagacttctggagggatgccttcccatcggtcatcccaggctggcaccagaacaaggacaactggaataccatcattctcgatggcagcataccggatgatgctataaaaaacatgattgcagacagctatgaccttgtcacctataatccgacccggctcatatatgaggctgtaaaaaggattccaaagggctgtgttgccacatattcacaggttgctgagcttgctggcaataaaaaaatgtgccgggctgtcggcaatgccctgcacaagaatcccaatcctgatgaaattccatgctatagggtggtaaatgcaaaaggtgagctgtcaggggcatttgccttcggcggagccgatgaacaggctaaccgtctaagagcagatggcattgaggtcatagacggcagggttgaccttgataaatatggaatacggattgtagatgatgttatatatacagcttccgaaactgcgccggtgtcatcccggtaagtttcttgaacatgacgataaaatggctggcatctgagtatcccacatcagatgctatatcctgcaccttgcgcctgctgtttataagcagtaattccttggctttattgatacggtagtttgtcaggtactcatacaccgagcagttcataaactccgtaaaaacacgcgatagatattgctgcgatacaaatacacgatcggcaagctccttggcgctgatatcgtccatgtagctttcttctatagcatctataacaggctttataaaacgcacatagctttggtcatcgctatcgtgtgtgtgattagactggtccgagagcaaaagtatgatgccataacagtcgagcgagagcatctgcgtatcactggagcgttccttaaaatcttctactgccttgtcaattgcttccgacacctccttccccttattctcatcaatcagccggtattccttttcatcaaacatttccctgaaggctgatgccattgtccctgtaaaagtggcaaactctgttttccagggcaggctattgccggatgagatgtttttattatgataggagtgtggcacgtttggagcaataagaatcccctgccccttttgcagttcaatcgtatgactgtttgacaaaacattgtctgaaacagcctgattcctgctgtataccgtcacctcacccacgccctcctttgtctgtaaataatggtacagcggatacccctccgggcgcgtcacgctttcctgctcccagtcattaccgacagagtcgaattgaaacggttctcttgcgaaattgcttccaaaataaataggcatgctttctcctttcaaaaacggtttagtttcagaatgttatataatttggtttatgatgttatactattttccgtaaatctattatatgattagtgcataaggaaacacatttatagtttaagaatatcataatattggggttaataccataacggaggtaaaaaatgcagtcaaaattcaaaagaatcctttttggaggagattacaatccaaaccagtggcctaaggaggtctgggagcaggacatggcatactttaaggatgcccatatcaacagcgccacaatcaacgttttttcatgggctaaaatacagccgtctgagaatgagtataatttcacagagctcgacgagatagttgatatgctctcaaaagaaaactatgacatcgtcatggcaacatccacagcggcactgcctgcatggatggtcaggaaatatcctgagacgatgagcaccgactacgagggacgccggcataaatttggagccagacacaatttctgtccgaactccctggtatatcagaagtacgcaaaggctcttgcgacagagctcgcaaaacgctatagtggcaataaaaatatttctgtatggcacatcaataatgagtatggcggatactgctactgtgacaactgccagaagcagtttcgtgtatggctcaaggataagtacaagaccattgatgccgtaaatgatgcctggaacacagagttctggggacacaccttctatgactgggatgagatagtcgtacctaacgagctcagcgaggaggcctggggcggcatgacaagctttgccggaatatcaacagactacagacgtttttactctgacagcatgctgggctgctataagcttgagcgcgatgcagtaaaagctatcattcccgatgcgcttgtcacaacaaacctgatgggtaccttcaaggggcttgactatttcaagtgggctaaggagatggatatcgtttcgtgggataattatcctgcatacgacacaccatggagcatggttgcgatgactcacgacctgatgcgaggtcttaaggatgagcctttcatgctcatggagcagactccgagccagcagaactggcagcactacaattcattgaagcgtccgggacagatgcgcgcacagagctatcagaccatagcccacggtgcagacactatccagttcttccagctcagacgaagcaaaggtggctgcgagaaattccacggtgctgtaatagcacatgtcggaacaaatgacacaagagtattcagagagactgcactgcttggaagggagcttgaaagcttcggcacaaggacacttggcacacgcaataagtcagatgtgggaatcatctttgactgggacaattactgggcacttgagtacacaagcggacctaccagggaccttaaatatgttgaccagattcaccactattatgagtatttttacaacaaaaatatctctgtcgatatgattccggttgatggtgatttttcaaagtataaggtgattgccgcacctgttctctacatggtaaaggaaggcatgaaggaaaggctcgagcagtttgtgaaaaacggcggtactctcatcacaacatttatgagtggtattgtggaccagtctgacaacgtgcatctgggcggatatcccggacctcttcgcgagatggcaggtgtctgggttgaggaaattgatgccctcgcacctgagcagtcaaacactgtaagcttttctgatggaaaagaatataaatgcaatctgctgtgcgacctgatgcacacggaaggggcagaggtactcgccacatatgaaagcgatttctatgcaggaatgcctgctgtcacaaaaaacagctacggaaaaggccatgtatactatgttgccacacagcttgaggcagaaggacttgcaagggtgcttgatgaagccacagatgaagtgtctgtatcaggtgtcattgctgaagagacaggtcttgaaatcacatgccgcgaaagcgaaaatacacgcttttactttgtgatgaatttcactgatgaaaagcagactctccctgcaagccttgcaggaatggttgacctgatcaccggagaagcagctaaagagggcgatgtgatgaataagtgggatgtgaagatacttcaggaagcgttataagagagccctaattatataaatttacatatatagtaaagctacacaaaagccgctgcatgcacgcagcggcttttcctcgtttttaaaaattatttctttaccatacatctcttcttaaagaaagaaattccatagcaaagcacctcatcataatcctcctcaagctgctttgcatacatctgattctctatctgatttaaagcttcatcacacttacactcaagcttttcaagctgtcttgtgtattttgcttcaaacactgctactctgccatttatctggtccttcaccaccacatcacttctgccatcgccatactccttatttgactccaccatatagcctgctccggcaaaaatccctgccagaaatgcatggtaaaaatcctctttgtaatcatgatagctgatggttctgcgtaagagtctgtttaattcgccttgaagctcctgtatattacctttccagacagcatcaaacaatgcgcttctgttccattttggcgcactttcatcaaaccatctgatgaccgttgtctcatatatttccctgatttcctcgtttggtattgtcagagcagtaaacctttcaggcaacggattttccaactcgtctgcccggacacttgtcagatatccggtcaggtacaaaatgctccacaggttctcttccgatgaatgaagataatcatatgtcagattttcatcaacctgctgcactatatatcctccggaaagaagcgtctcaagcttttgagtaatactgcttcccgcataatcgataaatgatctgataattgcattatcactagtatttttccaatagctaagtggttttgcatcaggcttacgctgtaaatcaagcacataattcatcacatcccacggacaataaacatccacatctccaaaatgatatccatcataccattttcttatattttctgactgattaaaaatatgagcatcctttaatatctcatcaacctcactctgaacaaatccaaaatactcggtaagccgtgagtctgcaacagaatccgaaacaaaattattcgttcccgtaaaaatactttccttcgcaatcttaagacagcctgttacaacagcaaattttaaggcgcaattatccttcaatgcctgcataagacccttcatcatatcaagcatctgtctgtaataaccgcctgcatttgcctttgcaatcggcacatcatattcatcaataagtaaaatgacctgtctgtcataatacaaattcatgagcgttgtaagaagccgtaagctgttcttaagctcggtctgcgttgcctctcctgcagcaatatttctaaatgtctttctctggtattcagtaatcctctcatcatcaagcagatataaatgctcattaaaaagctctgcgataacagaagaaagcatcgcacatgcactgtcaaaatccagaccatctacctgacggaatgacacaaaaattacaggccatttattcatccattcttcacacagactctgatgcgacataatatcaagaccctcaaataacacttttgaagcttttcttatatcaaaaaaactctcaagcatactcatagccagtgtctttccaaacctgcgcggtctggtaatcataataacctccgtcccaggtgactgtaaaagctcatatatcagattggttttatcaacataataataattattcgatcttatttctgtgaaattcgagattcctaccggaatgtttaatgccataatatgcacactccttctgcctgttttctgataaaattatagtaacattaaacagttataaatacaaggaaagtaactgcatttttgtatcattcacaaccgacaaaaaaccgggttgtccgtacaaaccttagtgtgacagacaacccgggatttcaattattaagtgtaactatattctacttgtagaaaatatttccaagcataagatccttcttgaagtttctgatggttgtatcattgtcgataaatacagcctcaatacccatcatggctgcccactcgcccatctgctcagcagtaaggtcatatgtgaacgctgtatgatgtgctcctcctgcaagtatccatgcctctgcacctgtgtaaaggtcaggctgtggtgtccagaagtttgttgctacaggaagctttggcataggcttctctgtcttcttgcagtcaactgtattgataatgagacggaaacgatcgccaagatcaacaagtgatgtggcgataccggtgccctcctttgatgtaaatacaagtcttgccggatcctctctgtcacccattgtaagcggctggcacttgatgcttataggaccgtctgcgattgatggacaaatctcaagcatatgagcctcgagtattccctctttgcccttcatgagattgtaggtgtagtcctcgagcattgatgtacccttggcatccttctttcctgctgtcatgatcttcatgagacgaaccattgctgcaaccttccagtctccctcagctccaaaaccatagcccttttccatgagacgctggattgcaagtcccggaagctgctttaatgcgccaagatcaccaaagtgtgttacgattgcctgataattcttctcctcaaggaatctctcaaatccaagctcaatctgtgcctgtaccgctacatgcttcttgaactcctcaggatctcttccctcaagcaggatatcgtatttgtcataatactcatctacgagtgcgtttgtatctgactgtgaaactgctgcaacagactctgcaatttcatttacagggtaagcatccacttcccagccaaacttaatctgagcctctaccttgtcaccctctgtaacagcaacatttctcatattgtcggctacacgcattacacggatgtggctgctctctaccacaccgactgctacacgctgccatgatgcaatcttttcctgtactacaggatctgaccagtgtcccacaacgacctttctctcgatgcccatacgtgtgacaatgtgtccccactctctgtcaccgtgagctgcctgattctcattcatgaagtccatatcaatcgaatcgtatggaatctcctcattgtactgtgtatgtaaatgaagtaacggctttctaagctccttgagtcctaaaatccatgactttgcaggtgagaatgtatggcaccatacgataacaccggcgcactcatcatctgtattggcctcgttgaaggttcttctgatgagctcatttgtgataagtgttggcttccatactacctcaaacggaagctttcctgactcatttaatttggctacaatctcctttgaatgtgctgcaacatttgcaaggcactcatctccgtacaggtcctgtgagccggtgcagaaccagaatttgtaattttttactgctaacatagttcttctcctttattttattttattttttatttttatttgtgtttatttatatttctctcgtggtttttatttcaaatacataataacactaatcattaaaaatcaaaataagtttttgtgctaattttatggttatttacggttatcttatgtgtccgtttttcttcataacgtatgcatccataccctcatctgattaagtccacgatttccccacatataatatggtatagcccttgctattacagacttttgtctaggtggcttctcagaatatagcgcatctgagccttcaagtctcactgcaggaatatctaaaagaaccgcaccctttaactttccctcagcttctgtttcaatacgcgcttcattaagccttgacacatctatcatcagactctgcacatcatcatcattgtccactccttcaaaagcgtacactaccggacctctctgcaaagctgcacagcctatatcctctcttacctttgtattggcatatattacacggatatccatattgaagctgatttctataacatcgttgtcatgccatttattttttatatagatatagccatccctataagaatagaacaaatctgcttttgtctcatcattctcttttaacctcataccattgagtgtcacctcaaagcttttcagatatcccggaatatgtattgcaacagcaagttcatcgcctgtcttcggtgtaatactgtatgaaacatgtcccttccacggatattcactgacaacctttatatctgcttttttaagccgagcctcctgaccgatgaaaagatgtgaatatattacatcatcatcctcatcccacgcatatctgcccagagatgtaaccatacgcacaagattcggaggacagcatgcacatgcataccagcccggtctttcaggaatgacatgcttatagccaaatatttcacctgatactccgggatttacctcaagcggattcacataaaaaaatctctttccatcaagctgcattccacttataattccgttgtataattccctctccataacatctgcgtatttaccgtttttgctcattttaagcatctgctttgcaaagaaaaccagtcctatggatgcacaggtctcagcgtatgccatatcattcggcagctcatactccttcgtaaaggcctctccctccactgttgagcctatacctcctgtaatatacatcttcttttctgtcatgttattccacaggcgctcacaggcatcaaaaagcttttcatcatactccgttgctgccagatctgccatggctgtatacatatagacagcacgcacactgtgtcctaccgcttcatcctgttcatagatagttgcatggctctggttatattttgtatcctcaggaatcatgccaaaatgcttccaatcacgctttgcggcttcctcagcaaaaaaagcgggattttttcctctctcctcgagaaaatatctcgcctgctttttgtaggcctcatttcctgttgcatgatacatacgcatcagacctatttcaacttcctgatgtcccggtattccgggcagcttatcaggcccgaatctgtctatgatgtgtcccgccatgccttccataaccttaagcagcttatccttgccggtagcttcataatatgcaacagcagcctccatcatatgacctgcacagtacagctcatgacactcaagcagattctgccatctgtgctcaggctcttttattgtgaaatatgtattcagatatccatccggctgctgtgctgcggcgataatatctataatgtcatcagctctcttttcaagcgcagcatcaggctttattatcagagaatatgccactccctcaagccattttgccacgtcactgtcctgaaagaccataccgtaaaactcgccctgtgaaaggcctgctgcaatcttaaaattctctattgcatgacttttttccactccgggctgtctgtcattaagcacgtcttcctgaaacggaatgacaacatctgtcacaagctcctgcatatgtccccaaaacggatcctctatttttatattctttaaatccatattctactctctccatattatatagccgtttttataacttttttgctgtgtgccttattataaaatgtcagcttgcatatgtacggtttacctcaagctcccgtgcgatatcctccggtgtcatgtatttcttgaacacacgctccagacaataattttttatacatccaaaacctcccggaaacagcacaaccagccatagcatgtccctgcaccagaacagtatgaataaaaatactgcaaccagcaaaatggaccagccaagatttgcaagcatcatgaaaagtgattttttaagagcctcctttaccgcacactcaaatctggccatgtatgaaaacagataaaatgcccatgccagtacagcacccgataataccaaaaagaaatagtacatcattccaagatatgttccggccttaagctgctgtttcatgagcatgcagtctgccacaagaaaagctgccggtataagccatacaataaaagcaagtgttgattttttgaaattgctcttaaaagctttccagtattcaacataagcatagctttttttatttcttatgcacttatttacagtataataaactgccgtagttgacgcacctattgtaacaagcgggatgctggtgacaaaccagaaaatcccaagtataagcatgtccactgcaacgtttactatagataaaattttattgtcgtaatttaatcctcgtggcatattatctgtccttccttaatctgagcaattctgttttaatattatgattaaagggtcaaaatactttttgaccctcatatcatattatttcgataatctaagtgtaacaacactgcatgccggaagagtaaccttcacaccggtctgtgtattttcatatgctgtgaaatccttctcatccactacctcaggtgcttcaaaggtattgtgtgcatccatggcaccttcgatgtatctggcctcacttacactgtatttgtcaccctcatttgtgagcataatatcaacatcctctgacgactcaagagaattgtttgtaagtgtgactgtaatcactccatccttatcctctgatacagactcaaaaaccttcggaagctcattctttcctgtaccaactgtagttcctcctacaagagagctgtccaaaagagctgcgccctgatgatgtctcatcatatggaatacataatatgtaggtgtctttatcatcttatcgccgtctgtgagcattacagactgaagcacatttataagctgtgcaatacatgccatcttcacacggtcggaatgcttgttgaaaatgtttaatgtcatacctgcaacaagcgcatcacgcattgtattctgctgatataagaatcccggattggtgccaggctctacatctgaccagatgccccactcatcaacaataagaccaatattcttatccggatcatactcatccattatagctccatgacgattgatgagttcctccataaaatatcctctcttaagagtctgataaaagatatcctctgtaaaatcagtcgcacttcccttgatattccagtcatcctcagtctcaggaagtgtgtaataatgaagtgataatccatccatctgaccatggaatctaggctcacaatgatcgaagcatgtagccatcaccttctttgtccactcatagtcatccacatttggaccacagcagattttattgatcggctgattgcctgcataatttctgacataagtctggtatctgcggtattcatctgcataatgctcaggacgcatgtttccaccacatccccagttctcatttcccacaccaaagtagtcaatagtccatgggtcttcgtgtccgttttccttacgcaaatcagccataggtgatactccgttaaatgtgatgtactcgacccactcactcatctcgcgtactgttccgcttcctaaatttccgttcacatatgtcttacagcctaactgtctgcaaagctcaaaaaactcatgtgttccgaagctgttgtcctcaactacaccaccccagtgtgtgttgatcatcttttttctcttttctttaggaccgataccatccatccaatgatactcatctgcaaagcagccgcccggccagcggagcacaggtatcttcatttcctttaacgcatctacaacatcagtacgcatgccgtttacgtttggtatatctgaatcctcccctacaaataatccctcgtagatacatcttccgagatgctctgaaaaatgtccataaatctccggagcaattgtgctctttttattctcattattaacaataatttttgccatattttctccttatctcttatacattattttaaatcatcccttaacagctcctgcagtcataccatcaatgatatatttctggaaaatcaaaaagataataaatatcggtaaaataccaaacattgagcctgcaataagtacatcatagttgtttccgtatggtgtgagaagagtattaagtccgataggaagtgtaaacttctctgcgcctttaagcacaagcaatggccaaaggattgcattccatacacccatcgctgacaatatacccatagaagcaaatgccggctttgtgagtgggagtattatttttgttgcaataccgtactctgtagcaccgtcaattcttgccgcatccaaaagatccttaggcagacctgacagatactgcttgaagaaaaatatggtcgatgccgagcagagtcccgttataataacaccaacatatgaatcaataagtccgattgcaataatctctttgtaaagaggcagcataagaatctcaaacggcaccatcattgtagcaattaccaaaaagaacaggaagttcttaagcctgtaattgtacattgtcagtccataagctacaaagtaacagatgagaagcgtaagcaccaccgatacaatagtgataataagagagttcttataccacataaaatacttctggctgtctgcgttgcctgaaaacagataggtataattatcaaggctcatcgttgagaaatcaagatcaattgaaagacctcttctgataagctccttgccaggtctaaacgatgctaaaagacctgcaaagaccggaaatactattatcgcacaaagtattacgaagaatcctgtgcctaaaacaacgccaaccttatgtcttggtgtgtctttgacagaacgcacttttttctttttatctgccattttttagtcctcctcgcgtttaaatgttccgttacatacaagctgtactatattaattacaagtgctataaccaaaagcaccataccaaccgcacatgcatagcccatgtcatttttctcaataccacgtttgtacagatatcccacaatggtgagtcctatgttcttcggcgaattgtttcctgcccacagcatgtacgactcaaggaacatcgcaagtcctgcatagattgatattgtcaaaacatagattgttgtcggtctgagtaatggtaatgtcacgtagcggaatttctgccagccgtttgctccatcaatctcagcagcttcatataatgaagtatcaattgactttagtcccgaaaggaaatagagcatatttacacctgtccatctccagcaggctaaaaccaaaagtgctgccattcctgtccagccgaccttcaaccatttgaaaggctccatgccgagtgccattacaagtttattcatctgtcctgtgctgtactctgtgaacatcagacgaaacagagtacctgaaataactacagatgtaagagccggcatataaagcactgctttccatacaccctttgcctttacaagattgctgtccataagcactgcaaaaagcattgggaacggaatcagtaatacaagtgtccagaacatatatgttgcactgttttttatcgctgtcaggaacactgtatccgacaacagcttcttataattctctaaagccacaaactttgtttccagtggtgtaatcttctcaaaactcataaatacagatgagcagagagggtaaatccagaatattgcaaagcttaatataaatggtataacaaatacatacggcgcaaccttttgtgaatacaagaattttttaatcttcaatttacgcacctctttcttattaataaagggaggccggaggccaaacctccagtacctcccccttttaagagctataaaattactcttcctgctccatatctactgcatcctgcagctcctgtaatgcgtcatccacgctgtaatcaggatcctcaagtacctcattgagagttgtattacatacattctcattaattgtaggactgattttaactacagaaatcttgccaatattgtccattccgatagaattgagcacatcgtatggatagttgatgaagaactgattgtactggttctcatcattgtgagcaaatgtatcatttgtccagcaagctgtgttacatacatcaaatccaagtgtatcccagatattctgctcaccaacctcagacattttagcccagcaaaggaattctgctgcaagctcttttgccttagactgctgtgtaacaactgtacctgttccaccgatacctactgagcacttctgtccctcctcgaatgtaggacattttgcgatgtaccagttgcccttctcatcaggcatatagtttgtgaaacggctcatataccacattgccttagggaatgaaacgatgttgtgatccatgatgttctggaaacctgcctcaaggtcaacatgtccgtcaggtgatacctctgcaagatcactctttaaccatttctgctgcattgtgagcatcttcttaactgaatcaagctgtacatttgcctttccgtcaaatccacctgtccagtcctctccgtactcagccattgcaagccataaccagtctgttccgcctgtatcaacagatgtccagtattttgtacccttctcacctgctgcctcaacatactctgttccaagtgcctcgtaatcatcccaggtctttactccgtcaatctttgcgatgacatctgcctgtgaaagccccattgcatctcccatagcctttacgttgtagtacataactgtggcacctacatgataaggagctccgtagtaatgtccgtcagggccctggtatgtttccattctggctggaaccattgtgctcatgtaatcctttgcataatcatcaagtggtactaaccatttgtcctgacctgcaactacgttagggaactgtccaacctcaacatcgcagatatcaggtgctcctgtaccggcctcaagtgatgtaagaagctttgtatgcatatcagcatatggatatgtagtacatgtaatctcgattgtcttgtccggatggtccttattccactgctctaccattgtgccgtagtgctgtgcatggagctcaacgaaggtccacatctcaaggtgtgttccctttgaatctccatatgtgtttgtcactacctctgactcagcagcttctgttcccccatctgctgcttctgttccgtttttgctgccgtttccacagccggcaagcattgtaactgccattgttgcacacatcagtgcactaactaatttctttttcattttccttcctcctgttaaaatgaaattgaattgataagttgtattaacctcctgtttaagtctcatgctgggcttattgctatttgactaaaacaggtcgttaatgtgttttgcttatgtacataatatacatgagagtagctgtaatgtcaatatttattttagattattttaaactattttaaacattgtttaataatgtctaaatttttatgtttttttcgtctctaaacatatctaagctatacatattgcacaatacatttaatttgatttaaagtcattgtaaataaattccaaaactatatacaataatttattgacaacatagtagcatatttctataattattatatgttttatacacaagaatttcatttttaattttataaaatattttaggagaatctatatatgatacatatcacatcattagacgacggtctcgaactgtttaaagctctcggctctgatattcgtatccagattttaaaaattctactcgaaaataaccagatgagcatgaatcagctcgcaaacgagctaaacatcagcaatggagctttaaccggacatataaaaaagcttgaggagtgcggacttatctccacctcaaacgattcatccggtcacggcaaccagaagctgtgttcactgattcaggaccgtatattagtagaaatcgaaaagccaatagacttaagcaacgtatacaacacctccatcaaggtagggcagttctcatctcacaacgtctgtccaacctgcggcatggctacatcctcatttgtgataggagagctcgatgacgtgcgttattttgaccatcctgaccgtttcaatgcagacattatgtggttcacaaagggctatgtggaatatgtaattccaaacctcattccacgtaatcagaaaataacccagctttcactctcagccgagataagctctgaggctccgggcatcgacaacaactggccaagtgatataagcttttacatcaatgacactctggtcggcacctggacctctcctggtgactatggagatgtacgcggaatgttcacccctgaatggtggcctcaaaactggaatcaatacggtctcctcaagcttttggtcataaatcataaaggcaccttcatagatggtctcaagatatcagatatcacaacctctgagctaaatcttgactacacaagcaccatccgcttccgcatagctgtcgaggagaattctgcccatgtcggcggactcacaatattcggaaaaagcttcggtaactatgatcaggacattgttgtatccatcaattatgcccctcttgacactgaaaaaaacactaaataataataataaaatgactgcggaaatcaaagccgcagtcattttgttattattttgttattattttatttgtactaccactttttatgaggacagtgcgaaacatctgtaagtgccctaagctccacataacagccgcatgcattacaggttccggcattaagcctgtcacacgccttgcacactgcaagccttgcctcatactctttttccggcactctgtcctcgccctttatcgcatcaacatatttttttatcattgctgcgtcggcctctgccatttctctaagcagacacttcttacatatcagttccatgtgatgtcccctttcttttgccttatcagttatacgaaaacacaggacgtccatccttccatccaaatctcataagcattgcatgacggtttggattataaagcggatttcccacaatttcagtctccgttcttgcatggtataccattatgtcatcaccgttttcatctacggtaaacgaattgtgtccgggtccgtaaactcctgctgtctcatcggagcaaagcaccggataacggtccttttcccacgaacgcgggtcaagaaggtctgagctttcatccgcagtcaaaagtccaacgcaataatgtattcccgtatcactggctgaaaatgtaacaaataccttgccatttcgttttaaaactgccgggccctcattcacccagaagccatatctctcccagtcataatcaggtgtggtcaaaagcacctgtacagtatcaagtgtgtatccgtttttcatgcgtgctatatacaggtttgaaatctgctttcctactccgaccttctctgcccagatatagtaccacacattgttcacttcaaaaactgttgcatcaagtgaaaatgcttcaaacgaaaactcatccccatctgctctttgcatcttgcctttctcaatccagttatcattaaccgggtcatccccctgacattccaatacatacggccttattgcccagatatcatccttatcaccgcctgcatagtaaatataccattttccaaacagataatgaagctccggcgcccatatatgtatgctctgcggtccactctcatgcttgtgccagatttcattctcatccgctgtctcaagtcctgcaagcgtatctgattttctaagtacaatcctgtcatattccggtaccgacgctgtaaagtaatatgctccgtctgtatgtctgtatacatatggatctgctctctgcagtatccatggttcattatattttaatgtattatccatttttttctccatctattccaatgttgttactatctaactatctaactatttacatatctgcctaatttgaaacgtaactataaatatttcacgccccagacgctcttgttttcgccaacagcagaaaatgtcatcacatcacttccagcctcatccttcatttgacagaatacaccggaatattttttaccgtctatagtgatattcatatagtatgagccatccttgcactcccaggtaccctctgacttttctccctttacctttccgtttttctcaagataaagaatcaccggatttgcaatttttgaatctattgccgttccctggtttataacatagtatcgtccgataatatcatcgatgtcgtaaccatccttattaacagtctctccctgcgtctgataaggcagctcacatggccagccatcctcattaacaagcatctgatgtactctcggtgaatgtccctctccattatcgttaaatctggtatgataaaccagatacatcctgccgtcgtcatccacaaaggccgaattatgtcccgttgccatatatgctttttcaaggctcggaagcttatagttgcctgtgagcttcagtccgaaattctggtgttgtgcacttttttcaggatatttgccattcatatccacatattcaccatcgactgtctttgaacggaatactctgacctgatagcctccattgcttgtcagagctccatacgacacaaacagataataataaccgcttgtctcatcatacatgatatatgggccctcaatcgaaatatgacctcctcccaaaagacgctttccataatacggatccacattgtttgctttatctgcttcaggatggataacaagtcctgttgtcttgtcaatttccaacaaaaatattccgccgctccatgaaccatataccatccacattctgccatccgcatcataaaacacagtcggatctatcgcattcggatagtcctcataattgtactgcgcccccttgatatagttcttgtaagcataatcctcatccacatagtcaagcacatctgtacctgaaatcgtctttctgttgaagcctgagtatatcaaagccccctgccattcatacggtccctcaggtgttgttgatgtgccatagcacagatttgatgcattccatgtggatgtcgtacaataatacatgtagtaaagtcctgttgtctcattgtagattacatccggtgcccacacatgcacctgtttatcatccgtctttatcaatgagttcttgcttccagaatacgcaaaggctttatctgccacatcatatatctgtccgtatacaggatttttctttgaatatccatcagcaaccttttcccagtttaacaggtcactgctttttgctgcagacatatgagaaccaaagatataatattcaccatccgccttaagtattgacggatcatgaaccgatactttcgatgaaacatcccctgtttttattccatcgtagctgaccttaaagtcatagcttgttgttccacacgccgcaagtcctaccgacatagctgcgacgagtgcacacgaaatggccttcttctttccattccttatcatgatttcctccctgtgaatcaatcacatgtttcatttaagctgatacatatatatgtatcaaattaatagttacgctcgcccagcatttatagatttaatatatcagataaaaatctataacacaatatatattttaaattttattaaattattttacactaattaaaatattaaagtttttatatgtatacaaagtagaagaaaggacaaccgtatcccggctgtcctttcttttattagtttattattatattagggaaaatatgaaaaatcataaaaccaaactattttaaatacttataaaaaatccttcactgatgcataaatgccctctgcatcaagtccgtatttcttaagcaaagctacagcaggacctgactcaccaaagcagtcctgtatgcctattgtctttaccggtgttggagccttgcgcgaaagtgtctcacataccgcggctccgagtcctcctattacagagtgctcctccacagtaaccaccctgccgcattccttcgctgcagctacaacaagctcctcatcaagaggcttgatagtgtgtatatttatgacctttgcatttactccatctgctgcaagcttttctgccgccgcaagtgactctgccacgcacagaccggtagctatgatagctacatccgttccctcacggagtgtaacaccctttccgatttcaaatttatactctgcattgtcatttattatcggtgttgcaagacggccaaacctcatgtatacaggaccctcatactcataagctgcctttacagcggcttttgcctctatatcatcacttgggtttattacaaccatgccaggaattgctctcatgagtgcaatatcctcgttgcactggtgggtggctccatcctctcctaccgaaatacctgcgtgtgtcgcacctattttcacattgagatgaggatatccaatagagtttctcacctgctcaaacgcacgtcctgccgcaaacatggcaaaggaactggcaaaaggcacctttcccgttgctgcgattcctgcagcgatacccatcatattgcactctgcaataccacagtctatgtgacgatctggaaattcctttttgaagatggctgtctgtgtggcagccgcaaggtcagcatcaagaacatatacgtcatcgtgctcctttgcaagctctacaagtgcatttccgtagctgacacgtgtggcgattttctttacttctgacataatgcttcaccttcctttctcagatcctccatggcaactgcatactcctcatcattaggagccttgccatgccagccgacctgattttccataaatgaaacacccttgccctttacggtatgtgctataattgccgtcggcataccctttgtattccttgcctctttaaatgcgtcagcaatctgatccatgtcatttccatccttcagatcaatcacatggaaattgaatgccttgaatttctcaccaataggatatggtgagcacacctgatccactggtccatcaatctgaagtccgttgttatcaactataacaacaaggttatcaagctttctgaagcccgcaaacatggcagcctcccagacctgtccctcctgaatctcgccatcgccgagaagtgtatatactctgtaatcatcatttgtaagctttgcagaaagtgccatgcccactgccgcagaaatgccctgtccgagcgaaccgctcgacatatccacacccgggatatgcttcatgtcaggatgtccctgcagatatgatcccagatgtctgagtgtctttaaatcctcaaccggaaaatagcctctctgcgcaagtgcagagtaaagtcccggagccgtgtgtccctttgaaagcacaaagcggtctctatccggctttttaggattctttggatcaatgttcatctcctcaaaatacagatatgtaaatatatctgctgcagaaagtgagccgcccggatgtcccgcctttgcagaatgcacagccgtgacgatacccttcctgacttcatttgctgtaatctgaagctctaatttgttcattttgttctcctgttaaatctatgacatgaaataaaatatttatacctgtctttggtttataatatctaatccccaaatacagctctgtaatcagcctggaacttctcgattccctgatctgtaagtggatgctttgtcatctgctcgataaccttgtaaggaattgttgcgatatcagctcctgcaagtgcacagtctgtgacatgaattgggtttctgattgaagctgcaataatctctgtatcatatccatagatatcaaaaatctctgaaatctgtctgatcagctcaatgcccggctggctgatatcatcaagtctgccaaggaaaggtgaaacatatgtagcacctgcatttgcagcaagaattgcctgatttgctgaaaaaataagagtaacgtttgtcttgatgccctctgatgaaagcaccttgacagccttaagtccctcaactgtcataggaatcttaactaccatgtttggatggatagctgcgatttcacgtccttcttttatcatgccctctgcatcaactgttgtagcttttacctctccgcttatcggtccgtcaacgatagatgtgatttctttaattacctcattgaagtctctgccctcttttgcaatgagtgaagggtttgttgtgactccacagatgactcccatatcatttgctttcttaatatcctcgacatttgctgtatctacgaaaaacttcatttaataatacctccgtcttatatgatttgcgtttgcttttatttgatgatataaatataacacttcaaaagcataaatgcaatagcaaaagtaaataaaagtaaaaataagtgtaattaaatatcaacaaacaaaagcaaacataaataattaaaaatactggctttatttacttatttgagttattatatatttatgcaatgctttgtgataaaaatatatacgtaaaaatacaacagaaatcaaaaggaagaggaaaatctatgctgcaattagaaagacaacaaaagattctcgattatttaaaagaaaaccgcaaggccaccaccaatgagttgagtgaactgcttggtgtatcgaccactactataagaacagatttaaaccagatggataaggaaaagcttctgacaaagactcacggcggtgctatctacaaggataaaacccatgacatgactgatttaacctcgagggcctatctgttccatgaccgcgctctggaaaacaaggaggccaaggaggagattgcaaacgaggcgataaagcttgtaagtgaccatatgtgcatattccttgatgccagctccacagcctacactctcggcatgaagctttcaggctttacagagctgaccgtcatcaccaatggcatcaatctggctttagagctaaaggatatccccggtgtcacagtcatcctgacaggcggtatcgtaaccagtgcatccgcttccatagaaggactgcttggcgctgatttactcaaaaagatacacacagatatcgcgttcgtgtcagcaagaggcttctctgtagaagacggactgactgatttcagtatatacgaggctgatttgaagcgcatgtgtatcaaggcctccgctaaaactgtggctcttgtagaccacaccaagtttgataccacatccatatcaagctatgcatcgcttgatgacatcaatatggtaatcaccgactccggtatctctcctgagacagcagatatatatgagaaggcaggtactgatattgttatatctggaatataaatgagacaatatagccatataaaattataagtacaaatataaatataagtataaatataactataactgtatatatagatccatcaaaaatgacacgcaacgttttacggctgcgtgtcattttatagttgtcttatacgcttaaagcatcagactatcttatatgcatttctgcccttttccttcacatcattgagcacttcatccaccgtcttaaacagcctagaaaactcatccggcacctttacatccggggcggtaacatatgcctgtgatacagtcagatactcatccaccttagagctctcatgaagtatctgttttttggcaagctcaagtcttatatgctcggctatatttttaatgatatcctcatccgtttcctgcaggattatgtagaattcatcgccatagaaatgataccccattcccttatctttgatgctctcatttattatggatgacacttcttttagcactgcatcaccagtgactctgccactgtttctgttaaatgacttgaagaaatctatatccactactccaaacgtgattcctacaccatctgaatcctgatttttgctcacaagcttttcaaaatcgtttcgcatcttgaacttattgcccatgcctgtaagcatatctgtgtagttgagtctgactgccttacggcgctcatactcagtctcctgaagctgaagcttaaggtcgattgtatcaccaagacgctttatctgctccttcacctgcatagagtggagatttgcgtaatatacgcacagcttgttgtacgcctctgtatcacccatggcgctctcatatttcatccacatcttgacacaggtcttctggaaaaacagattttctgtttcggtagcaaagcgttcatattccacaataacctttttccatgcatcaaactctcccatattcataaacaaattgcaaaggcttagtatctcaagcacataatcggcagaattgatattgtttatcgcaccctcaaccagctcttccacatgatctctgacctcatcctcatttcccatcttccatagcatatgtgcctgtgacatgtctatcagaaatctgtttttagcgctgccagctatctcattaaagagtatcgcgtcagaaagatgcttttctgccttttcaaactcattaattcctgtgtatgatatgcacagattcagatgaagcatgagaagctcctgataatagttatccctctctccatgcagcggtggcttgcacagctccagtgcttcgttaaaatatctgacagccttctcatacaatccaagctccatataaagtgagccgatattattgtttacaagcatgattatctcagttgagccctgctccacagctacatccatagcctctaagtagcagtcaatcgacattcttacatctccaatggatgcatatatgactcccataaaattgacagtctttgccatctgctcatatgcgccacagctcttataaagaccggctgtctcctgtgccttcttttctgccaaaaaaagcttattctcgccaaataaggctgctgcctcatccatacatctgtctgccttttgcaatatacccataaaaaccctcctatagatgacaatacaatctatttctcagcaagatactgcttatatccaacctgtttcagcttcgcatcctttgctacaacctgagccttcatatctgctgtatactttttgattttctcaaggattgcatcatcacctgctgcgagtatctttgctgcaaggattgctgcatttttcgcaccatcaattgcaactgtggcaacaggcactccaggtggcatctgcataattgagaacactgcatccattccatccagattctttcctgaaagcggtactccgataacaggaagcgcaaaaagtgctgcacacatgcccggaagggccgctgccattccggctcccgctataattacttttacatctctttcctcagcgcctctggtccactcaataagctcatcaggctcacggtgtgccgagatgatggtaagctcatactctataccaagctcctcaagcatctctgcggctttgctcatcacctttaaatctgagtcgctgcccataactattccaacttttgccattttatcctccttatatgtctaaaaatcatttgctttctgcatcaagcgtatcgagcggtttgttcaactcttctacgccctccagcacaaatcttccatctcttattatatcacatgttgagccatcgtgtcgaataactgtgatggctccaagctcatcatacggtattgtgatatccgtgtgacagttgaaatatgcctttgatatatcctcttttctgcggatggaaactgaattgtccctggcaatgattgcctttccgtcagggttatatgtcatattgtcctcatcatatgtgtagcaggtatcacccactgcaaagtgcggtcctgtcttctctgctataagaataggcatctttgccgcgatatcgtatactctcgccatacggtaggctgtagtattggtgcctatggcaaattcacccataggcagtgtgtcatgatggtaaagcacattgtctgatatatactttttgttctcttcctcattctcaaaattggtacatgtatatttatcaatcatgccatccttaaagtcaatttccagattaaggaaattaagctcattgagatatacctgactgacatgcagcttaccgtttgtaccctctaacaccggtgaagtaaacacctctccgacagggatatttacatcagccacacagttttcaaaggctgtctcctttgaaggctccttaagctcatgaatcttgacatacaaatctgtcctattgccgtttgtaccgacgatgtgcaccctgtctgccgtatcgagcacatctatgattttctgctgcatatccctgtaaagtgcataatcaagcgtattaatctttacagtttccgtaaaaatctccttataatcagatccgattgcagcacacggataggcaataatagtaaagcttctgtcctcgctgtgtatatagctgttcatataccgtgaacgcacacctgtcatatggactacaagcttctgctgctcatcgttaaagtgcgcagcctccttctttgaaaccggagcaaatggctcctcgccaaatatctctatgacagcaggacctccacatttacatgctacatccttcattctctcaagtgcattgtgcatgcactcaagacgatactccacatatgccttgtcaagccacagtgccatatcctccttgtggtcatagtcaaactgcttgttgaccgatgtagaaaatggtctcatggcaggcttcatgcccattttctcgaaattctttaatgatgctcttatcatacgctcaaagccaagcggataaagcacctgaaccactgacttttttgagatatccttgttgcaggtaataaagccaatgcggtatccttctgtataggtatctgccatggcctgtatctcctcatctgaaaatgaagccagatgtgctctgccggcgcgctcattctctccgacatacagtccataagaatacagataatcatcatttgacaaatctgcctcatttacaatctctgtatagtaatcatatgccgggtcaagaagtgctctgttgtcatcctctgcaaaaatctcctcataatcatgcatgaacgaatatatacagccccttatctcatcaggactcagctcattggcattctcaaaataattgtaaagctctacaataagctctgcataaatgcagagatattttatatccccctgatagatatgcgtgatgcttccggcaatttttgcatatacagccgataaaagctgaccatactcatctccgagcacctttacggcatatgccgggttggcatagcttttctcgtaattttctttatcaaactgtgaatagaataaatcgttaaattccttatctgcgctatggtttttaatagtgttgatgcactttgctgcacttctgaaataatctgcaaaagccggctctatcgcaggttctctgacgatctgctctatacgctcctccacaagctctaatcgctctgcgtaaagctcattggagagctcataaatctctttataactcatatgtccctataatctttctattttataattcaaatgttcatgacagttttatcacactattgatataatatgtgctaaataataaagccgacagcatacgtcccaccccagctgagcaccgctataagtgcaaaaaacactgccagtcgtggaaatgtcatgaatgattcctcatcaaagaggcttctgatggcaaacccgaaatctgccagagatatgccaagcatcagtataccggcactgccatagtacatagacagattgccatctcctctgaatgccgcattcaaaaaaactatatatacaatctctatgaggatagccacaacaagtgcagctatccccctcttagattgcttcttttccgtaaacttatacctgttacgttttcttctgccaagcaatttatattctcctatttgcagccgtactgcttatagtactcatctatagctgctttgattgtgtcatcaatgactactctgccatcatgctctctgttgtagagatactctgtgacctcttccattgtaacgatagccctgccttcaaagccgtacttctcatggatttcgtcgagcgcgcttaccttgccgccctgtccgacttccattctgttaaggctcaccataaggcctacgattgtaacatctgcagctcctcttacctttggaactgtctcctccattgatttgccggatgtggtgacatcctctatcataactactctgtcaccatccttaagcttgcttccaaggaaacctcccttgtctgcaccatgatcctttgcctcttttctgtctgagcagtagcgcacctctttgccatagagctcatggtatgcgatagctgttaccactgcaagcggaattcccttgtatgcaggtccgaataatacatcaaagtcatctccgtagtttgcatggattgcctttgcgtagtactctccgagtctcttaagctgtgagcctgtcacatatgctcccgcattcatgaaaaatggtgatttacggccgctctttaatgtgaaatcaccaaatttcagcacgtcactctccaccataaagtctataaattcgctcttgtagctttccattgtatgttaatcctcctgtgtgtttttctttaaattatctttgtcaattttaccacattggggcgtgcttttcaacgaggaaattggttacaaaaacagcatcccttcatattaaatgaatatgggatgctgttcatctgcttatatatttttatcagatatactcacttgtgtttacaatcacgccgtcatatactgactgctttttgataaactccgcagccttgtccacatctctgccgtttttgttccagtcctttgtgaactcaactttgtcggcttcaagcgccttctcctgcttttggctgatgagcagaagtacgagtattccggcatggcttaggtgcttgactacatttacgaagtcctcaccctcctttggtgcgtagagataagtatggcgtccgtctatatttaaggctttctcgacatcctccacaaagccgcggtttacaccatccactccgtctacgaatacggcggtgattgccttctggcccttgattgcagctcttacgtttctgtctactctgccctcgtagagaccgctttcctctgtgtgtacctcttcaaccacaccgcaggcagatgtcatatcggtcacacggtcgattaagatgaactcaccgagtgtcttgtgatttttgaacttatcgcagactatcttgtccgagaatgcaatctttacaactgctatctcgttctttttaagcttgtcggcaggcttttcctcacctgtgtttacatcgatggtatgctctatctctgttacgatgcccggtattgacttggtaccaagcttgaagaagaaattctttcccttaaagagctcatcgtcatccatccagagtattgtagctgtgatggatgaagccacctttgctcctgaaccgattgtgagcacgcagcctcttgatacgtccacctctctgtcaagctggattgtaaccggctggcctgtaaatgcgctatcgcttagcttatcacccacatggatgctctttacatgggcggtctcattgcttggcagtgtggtgatttcatcgcccacctttacctctccggcctctatctggccctggaatccacggaaggtgtggtcaggacggcagactctctgtacaggcatgtaaaagccctcttcctcgttctcatcctttatgtcaacatcctcaaggtatgataaaagagcaggtcccttgtaccatgggatattctcagactttgttgtgacattgtcgccctctgttgcagaaacaggaattattactacatttttaagttcaagctcctttgtaagctcaataatctgctttgtgatttcatcgaaacgcttctcgtcgtagcctacaagatccatcttgtttacagcaaatacaaagtagttgattcccatgagcgcgcagattcttgcgtgtcttcttgtctgaaccaatacgccctgctttgcatctattaaaattaccgcaaggtctgcaaaggatgcacctacagccatgtttcttgtgtactcctcatggcccggtgtatctgccacgataaagcttctcttatctgttgtgaagtaacgataagccacatcgattgtgattccctgctctctctctgccatcagtccgtcgaggaggagtgaatagtcgatggcgccgccacggcttccgaccttactgtcaagctccaatgctttttcctgatctgcataaagcagctttgaatcgtataatatatgtccgatcagagttgattttccgtcgtccacgcttccgcatgtaataaatttaagtaatccgctcattttagaaatatccctccctctttcttctttccatgctgcctgccgcctcgttgtctatgacacgggtggttctctctgaggaaacagcactgagtgtctcatcaataatctcatcaagtgtattcgctgtcgactccacaccacctgtcagtggatagcagccgagagttctgaaacgtacactcttcatctggattttctcacccggacgaagcttcattctgtcgtcatctaccatgatgatgttgccgtctctgtatacaacaggtctttcctttgcaaagtaaagtgaaggaatctcgatattctctctctttatatactgccagatatccttctctgtccagtttgacagtgggaaaactcgcacctcctggccctttttgattcttgagttgtagagcttccacatctccgggcgctgattctttggatcccatgcgtggttttcatttctgaaggagaagattcgctccttggctcttgatttctcctcgtctcttcggccgccgccaaatgctgccgtaaagccgtatttgtcgagcgcctgcttaagcgcctgtgtcttcatgatatctgtgtatgctgagccgtgatcaaatggattgatgccctgctttacgccatcctgatttatatattcaagcatctcgatgcccttttccttagcgatacgatctctgaattctatcatctcatggaatttccaggttgtatttacatgtaaaaacggaaatggcggcttctccggataaaatgccttcattgcaagatgaagcattaccgagctgtcctttccaattgagtacaacataaccggcttctcgcactctgcggctacttcacgtattatgtatattgcctctgcttcgagttcgtcaagatgtgataattcacccatgtctgttaccatccttttctttaatatttattggattccttcttgttgataagaatctcttccttgcttccgtcgcgctttttgatatcccaggtcagcgtgtccggcgtgctttttactgtcatgagacttcccatgcctcctatgtctgctccaagataaagagcaatagcgccaaaatgacattcctttatgcatgaggcacagccccagcagtccttaggatatttgataaaggcttttttctctgaatcctgatatatcaggcttccggggcatacacttgtacacatgccacagcccttacactttgctttatcaatcattatgctcataacgcgcctcccttccgacaagctctctgtaaatcatgtgaagctgcccgttttcgtatctggaattgacgtatttcatccaatcatcactcttgtcgggataatccagattctcagcaaagctatgccatctggtctcctttctcgcaccaagatgtgctatgaccgaaagacataccgtaagcctctccttaagctcatatatgaacataagctcgtgcatatccgatgcatataaatcaccggtcagctctatcagatgatatatcttttcctttgccagcgcaagctgcttgccgttgaactgataatgtgtggaaataccgcctgcgtagttgtccatgaccttctgcatggcttcctcgatagcctctgttgtaaacatctgggacctttcagtgaggaaatggtcgtactctgaagcttttgcgtcaagcgcctttttctcatcaaatgctgatgtgtcaggacttccgtcggaggtatctgcatcaagctttgaaaccatatctatcgcagcgatttcaccctctaccatagctcctgtaacgtatttctgtggacatcctcctgccacatctccagcagcataaagtccgtggattgtagtctcacgctcggtatttacccagtagccgctcgctgtgtggccacctacgatatacggctcggtgccctctatctccacattctgctcacttggattcttacctgcctccacccacttgagtgtctggcttggtgccatgttgagatatgcctttctcaatgactcatcctgctgtggagagatgccctctgtccttaagtagcaagggcctcttccctcaagattttccatgaccgttccgtatacacgctctgatgtggtgagaccgtattttgtctcgtaaacctctccaagtgaattgacctgctttgccccgactccctgtgcaattgttcctgtcggtgcaattgtgtccttgcatctgagtgcgataaatctcatctcaaaggtggtcatctctgctccacttcttatgcccatcgcatatcctgcgcctgtattaaacggcggataccacatcttgtgccttgaaaagccgggattgtttggtctgtataaaccggccgctccgcctgtagcacagagcacctttttagccctgatttcataggctgtagcatcctcgattgaaaatccgtatgcaccctttatggtgttgttctcaactatatagtccgtgatattgattctgtttatcactgtacagtccgtaagctttgatacagcttctgccaaaagcggcttcatgttctcgccgtttatcttgatatttcggtttcctcttgctacatactcaccgttttcatcctttaatatgacaagtccaagcttttccatcctgtccgtcacacggtttaagccctcggacatagtcatgagtaagtcttcccttactatgccgtcagcatcctttttggcgtagtctacatagtcctcaggctttctgccctttactatgtatgcatttatcgcattgacacctgctgcaaggcatccgcttcgctttatgtttgctttctctgcaattataatcgaataatccgatttctcacggatggtgagcgctgcataacagcccgccgtgccacctcctattatgaggatgtccgtgtgtaggatttttttgttttctatcttcatttatctccctctacttcctctttcaatcacaagctttagactattcttgtatctaaatgtagaatacatcctgctcctgcatctcgctgttttccatcaggtatgttttctcttcatcgaatatatacagcctgtaaatcagcacatgcactttctcgccgactgctatcaggtccttttcaagtgagcgctcgccgaccacctcgatgccgtttatgctgactgtgatatccatcctgtttcctctgaataccacatctgttacgatgccctcctctgccgctgactgatagcggtctaagttgccactctttgatatcttgataaactcaggtctgattaccgccttgtcggcattttctatcctgtcaaagccctttagcctgtcatagttttcaacgactgtggtgtgtcctataaactgcgccacaaaaggtgtatcaggcgacttgtatatctcaagaggtgtacccatctgctctatcgtgccgtggtttgtgataatgatttcatctgccacctcaacagcctcatcctggtcatgtgtgacgaaaatacttgtgattccaagcttttcgaccagctccttcagccaggtacgaagctcacctcgcacctttgcatctatcgcggcaaatggctcatccagtaagagcacctgtggattcggcgccagcgcccttgcaaatgccactctctgacgctgtcctccggaaagctgattcggatatctcttttcaagccccgacaagcctgtcatctctagaagcttggtaacacgctcctttatgagctttttcggcatcttctgaagctccagcccaaatgccacattgtcgtatattgtcatgtatctaaacagcgcatagttctgaaacacaaagcctatgcctctcttcgaggccggaatatcattcactcgctttccatctatatatatgtcacctgaatttggcgtctcaagccctgctatcatacgaagaagtgttgtcttgccactgccggacggaccaagcagcgccacaagctttcccttttcaactccaaagctcacattatcggatgccaggaagtctccgtattttttgtatatatttttcatctcaacgtacatatacgttatctccctcctgcttttcccataaatctcagtgtaatttcttaaatttatgctcaactatatttcttgcaaaaagaatgattaatgcaataatcaacagtatcgacgatacagcaaatgccgatgttatcgagctgtctgtgcccgacatatacaaggcatcaatctcaagcggcagtgtaaatgtctcgcctcttgtcttcgagagcgcatttaccgcgccgaactcgccgagtgctctcgccgtacagagtatgattccataaatcaggctccacttcatctgcggaagtgttattttccgaaatatcgtaaagccggatgctcccatcagcgctgcggcttcttcctcatcctttccctctgcattgagcaccggtataatttcccttgacacatacggaaacgtgacaaatatcgtggcaatcacaactcccggtattgcaaaggtaattctcacattcgtgccgaatatctcgttgaaccatctgataaccggataaaaccacccaagccgtccgaatgtcataagatacgcaagtcctacgatgaccggagaaatagaaaacggtatatcaataagtgttgcaagcacctgctttcctttaaacgaaaacctggtcaacagccacgctgtccatattccaaagaaggtgttgataactaccgcaaaaactgttgctatcaaagtcaccttgagtgctgaaagcacgtagcttgtggagatagctttcagatagaatccaagcccctcctttaaagcacttgccatcacagaaaaaagcggaactacaagcatgacaaatatgaagagcaccgtgacagtgacgagtattatctttgtgatcttttttcttctttcaagctttacctgttcggtcatcgcattgtgctcctttcctgtttgtgtgcatcgcatttgatttatatgcagccttctacaacaaattagtgcgctgtgactgtttaacctgcactatatttacaaatagcagcagtaaaaatgatatgacaagcatcacaagtgctatggcagtcgcgctggcataatctatatagctaagcttctgcatgatgacgtaggataccacctgcgtcctgtgccttgcactgttgcctgatatgtagatgacgcttccgtactctcctatgcctctggcaaaggcaagaccaaagcctgttaagagtgccgggcgaagttccggaagtattaccttaaaaaatgtcttatagggtgtggcgccaagcatataagcggcctcctcatatgtattatccatcttttcaagcaccggctgtacagctcttattacgaagggaatgcctacaaaaacaagtgccacaactattcctgcctgtgtgtaagccacatctattccaagcttgccaaggcccttaccaaaaaagcctgtgcctgagtacagctttgagagcgtgatgcccgcaaccgctgtcggcagtgcaaacggaagctctataagtccgtcaagcagccatttcccgggaaaatcgtactttacaagtgtccatgccactatgagtccaaataccacatttacgattgctgcgataaatgatgaggtgatgcttgtgataaaggcattcctcacattctccttcatgataagtgccacaaaatcgcccggcgatatctttagcgaatacacaagcactgatgctaacggaatgagaacgatgactgaaagcatcgtaaccactattccaagcgaaagatggtagcccggtatgactctggtctttatgttctttgatttagttttctcttttgctgttttatcagttgccgtatatttcatcgaacattgctccatcatcgaaatatgtcttgtaggcttcattccatccgccgtaatcctctatgctccaaagcctgatatttaaatcaaacttgtcggaaaaccggtttaatatatcctgattggttggtctgtagccgttttcgccaatcagctgctgtgcctcatcactgtagagatactgtaggtattctttgcttacctcttgtgttccgttgctccttgcattgtcatccacaatagcaacagagggctgtgctaagatgctgacggacggattcactatctcatacttacccggatatgaatccatggtcgtaagtgcctcgttttcccacgctatgagcacatctccctgaccgttttccacaaatgtggttgttgagcctctcgcacccgaatccataattgtgacattttcatacagcttcttcataaacgatttctgttccttcaggctgtcataatttgtcttcgcatagcttagcgctgcaagaaaattccagcaggctccgccactactctttggatcaggcgtaatcacatccacattctttttcaccaggtcatcccagtcacttatatgctttggattgccctttcttacaagtaaaacgattgttgatgtgtatggtgccgagctgtcagaaaactcatcaatccagcccttatcaattaagccggtattttgtatcaggtctatgtcatgctcaagtgccagtgtgacaacatctgcattacagccctccacaaccgagcgtgcctgtgctcccgagccgccatgtgactgaatcacatttatctttttgccgtgctcgctctcatagtaagactcgaatattttgttgtatttctcgtaaaactctcgtgtcggatcatatgacacattggttatggtgactgtgccgtcatccttcctgcctgagcagcctgtcagaagaagtgacagaatcatcactgtcgacagcagggctgccgtatatttatgtatgtttctcatgtatgtttctcatttttcatgttacagtttccggcaaagcaagcttatgccgtcagtttatatgccattagtttactgtaaaaagcggtgtggacaggtatctttctcctgtatccggaagcagcaccacgatattcttacccttgttctcaggtcttttcgcaagctctgttgccgcatatattgctgctccagaggatatgccaacgagaagtccgtcgctctttgcaacctctcttgccttgtcaaaagcggcctcattctccaccggaatcacctcatccactatatccatgcgcatgacctttggaataaagcctgcaccgattccctgtatcttgtgaggtcccggtcttccgcctgagagtaccggtgagctctttggctcaacagctactatccttacatcaggattatggtctctcaatccaagcccggtacctgtacaggtgccgcctgttcccacagatgatacaaagatatctacctttccatctgtatcctcccagatttcctgagcggttgtagctctgtggatatccggattggcctgattctcaaactgctgtggaataaaggcattgccataatgctctttaagtctctgcgcctcatcaattgcacccttcatgccctcacgccccggtgtgagctttatctctgcgccaagcgctgtgactatttttcttctctcaacgctcatggtatcaggcattataagtatcaggtgaagcccctttgaggctgccacaaatgcaagtccgattccggtattgccacttgtcggctctatgattattgtgtcctgatttatctttccatcctttatgccctgctctatcatagctgccgccaccctgtcctttacacttccaagtggattgaaatactccagctttgctatgatttttgcttcaagcccaagggctttttcataattggtcagctccagaagcggagtgtgacctatcagctcagtgagttgccttgcaatttttgccattgatattacctcttttttgttaatgtttgttttgagtttgttatgagtttgatcttagtttgtatggttgggatttcctaccattcaaatatgatttctaagttattgatatgttaccactaattgatatttttgtaaatgtaattagggttattaatatttgttagcgggctataaattttattgatagcagatagaatttactataaaaaaagagttctatcattcgcagacacaaggtctgtgaaaaatagaactcttttgagttgtgctttagctactcctcctgttcatttgctttatcggttctcgtgatatacttgattccgacaaaggttccaatcaggataagcactcctattataaaaggtactacaggatttctgacaaaacctgctatgatgtaggtcaggcatgatatgcctgccacaagcacagcgtacggaagctgtgtggacacatgattcatgtggttgcactgagctcctgccgatgccatgatggtggtatcggatatcggtgagcagtggtctccgcatactgcacctgccatacacgctgagattgagataatcatcatcgtatggtttgtgcccgagaagatatttactactatcggtatgagtataccgaaggtgccccatgaggttcctgttgcaaaagcaaggaaggctcccaccaggaatatgattgccgggaacagtccaagcagtggtcccgatactcctcccactaagcctgcgacatattccttggcaccaaggctttctgtcatggtctttagtgtccatgcaaaggtcaatatgagtattgcaggtaccatcgccttaaagccttcagggattgaattacagcaatccgtaaagcttagcacccttctgattgagtaaaagcatatggtgattatcagtgcaaagaagcttccaagcataagaccaatcgacgcattgctgcctgcaaacgcatcgacaaagcctgttccgtcaaaaaagcctcctgtgtatatcattcctatgatgcagcttattatgagcaccagtataggaaatacaaggtctataacctttcccttgccccttatcacatcctgctttgcatctgcatatggtctgtctcctgtggtaaataaatcgcccttttttgcattggcttcatgctttgccatagggccaaaatccgcctgcaagataacaagtgtcaccatagcgataatggtaaagagcgcatagtaattgtatggaatggcctttatgaaaatagaaaagccatcctctccctttacaaagcctgtgactgcggctgcccacgatgatataggtgcgatgatgcacacaggcgctgctgtggcatctatcagatatgcaagctttgctctggaaacctgatgcttgtcggtgacagggcgcatcacacttcccactgtcagacagttgaagtaatcatctataaatatgagcactccaagcattatagctgcaagctgggcaccgattcttgtctttatgtgctcacccgcccattctccaaaggccgccgagccgcctgccttgttcatcatgctcaccatgacaccgagcacgactaaaaatatcagtattcccacattgtccgaatccgatagcactccgacaagtccgtcctcgaatatgtgaagcactgatctctcagccgaaaaaccagcctgaaatacatttccataaaacagtccgccgatcactattccgacgaataatgagctgtagacctcctttgtaataagtgccagaactatagccacaacaggtggaacaagcgcccagactgtggcatacatagcaggcacgtattttactgccagaatcattattttctcctccgtctatcccttattctctatctgtcaaccgcaccgacaagctctgaaatatcctttactccatacctgtccatgtactctgcgatgccatcaactatctgctctgtggtctttggattcacaaagtttgctgtgccgactgaaactgccgtagctccggcaagtatcatctctatggcatcggcagcatttgtgataccgcccattccgataatcgggatattgactgcatgagctgtctcgtaaaccatgcgcactgcaaccggatgcacagccggaccgctcatgccgcctgtcttgtttgccagcacaaagcttcttctgtttatatcaatcttcatgccggttatggtattgatgagtgaaaccgcatcagctccgcctgcctctgctgcccttgctatctcagcaatgcttgtgacatttggagaaagcttcatgataacaggctgctttgcatattttttaatctcgcttgtgatggtctcaacaccctttggatctgttccgaaggcaattccgccctccttaacattagggcatgagatatttatttccatcatatcaataggttcgtctgcaagacgctttaccacatcaagatactcgtcaagcgaatgaccgcagacgtttaccacaatccttgtgtcaaactgctttaaaaaaggaatatccctcttgcagaaaagctcgatgccgggattttgaagtccgaccgcattgagcatgccgccgtacacctcagctactctcggtgtgggattaccctcccatggcttatttgcaacaccctttgtggtgactgcaccaagtctgtttaaatcaacaaactcgctgtactctgcgcctgagccgaatgtgccggatgcaactgtaacaggatttttccactcaacgccggccacctttactgacatattgctcattacagctccacctccttcgcatcaaaaacaggtccctctttgcatatacgcttgttgtttacattgctgtgggcatccttgtcctttgtattgcatacgcaggcaagacatgcaccgattccacatgccatgcgctcctccattgatacaaagcagtccatatcatgctctgtagcgtaagccttgagtgcacgcagcataggcatcggtccacatgcataaatcacgtctgcctcaagagcattctcctttatcgcatcgatgacattgccctttgtgccgacactgccgtcctctgtggcgacaaatgaagctgcctgctccttaaactcatcaagaaggaaggtattctcatcgcgatagcccatgacgatgttcatatcgcatactgcacctgcctgtcccgaatttttttcttcacctgatgtctgcacaatgcctgcatttatatccttcgcaagctgcaacataggcggcactccgattcctccgccgataagaaatgccttctttcccggctctactgtaaagccgtttccaagaggtcctaaaatccttaccttatcgcccctgacaagctttgaaaactcctctgttcccgtgccttcacctgtcacacggtacacgagacggatggtgtcatcatctctgtttatgccgcaaaggcttatcggacgcggaagcagcttactcttgtcgtttgagtaaaccgatacaaactgtcccgcctttgctgcctttgcaattttgtctgtcttaagtgtgaggtcgtagatgccattgccgagtgagctctggtcaactacaactgcaatctcctcaaatttctctgccattttatctccctggtttcgtttgttaatatattaagctttctgaatgacttattaacgatttgcaagtgctcctgaaatatcctcaatcatatcctcaactgccttgcgtgatgcatctgcaaaattctcttctgtgatgcccatatccttgtacttatcctgcttgtatgcgcagatgataccgcgtgatgaattgacaatcgcaccaagtccgtcctcattgaagaaatgaacaaggtctgctcccttgcctccctgtgcgccgtagcccggtacgaggatgaagctctttggcattaccttacgaagaatcttaccctgctcagggtatgttgcaccgacaaccgcacctacatagctgtatgaatcacccatgcagtcagctccccactctgcaaccttctcgcctacccactcatataatggacgtccgtcaatcatacggtcctggaactctccacttgatggattagatgtctttacaagaatgaagatacccttcttctcctccttgcatacatctacgaatggcttgataccatctgttccaaggtatggattgacagtggcaaaatcctcatcaaaggtagaatagctcttgctgccgatctgtacccttccaagatgtcctgtggcatatgcagccgatgttgagccgatatctccacgctttacatctccgataaccacgagatccttctcatgacagtaatccactgtcttctggaatgccttaaggccctccactccaaactgctcatacatggcaatctgtggctttaccgcaggaatcaggtcatatgtggcatccacaatagccttgttgtactgccagatagcttccgctgcaccggccggtgtctctccaagctcatcaaataccttctttgtgatgtgctcaggcacatatgaaagcatcgggtcaagacctactacgataggtgcgtttgttttcttgattttgtctactaatttgttgatcattctttcgtcctctttatgcgtattttattatacagacagatattatgattattaaatatctgcatacagttataaatattttatagcataaacaggattcttgcaaccaaaaatataatagcagggagtatagcattaattgctgctatactccctgctgaaatcacctttacagcttccatttttcaatcacacattgatgttcttttgtctttttatcataatttattccaacaagaagtaaattacctttataatctttcaaagcatccacatacagtctagactttatctgtgaaatggcaccatcaacattcttatcatatttcaattcaataacaactgccggcttatccaaatgactcactcttggaataaagcatacatcagcaaagccttttcctgttggtaattcacgaactattgagtaatactccctggccaaataaaatgccaaattaattgtacagcttaaagaattctcatcattatactgtaaaatagatatctcattatgagccttatctattccgtcagcaaccgcagcaccattcatattccacaaactctcaagcaatttttgtgatgcttttattgattttgccacttcatgccagtccatcgtactaattgcattaagatattcctttgacacctctcgatttggaattgaaacttcttccgtctcactatcatatgtcaggtatccaagatgtactaaaagtgtaagcacatcatcctttgtggcaaatgatgtcatatcattttcaaatgtgcctgtatttattttctcactttcaccggcaagcattttaatcacggcatcttttagaccatccatattcatttggatgtaaaccttgagagcctcgtaagtttcagtctgattccaataagtaccaaatttatgctttagcatggcttctactacagacttcggactgtacatcgcatatttctttactccatatttgctatgggacacgagcttatatccattgtaccatgcccttgcctcttcaaagtccatatcgtatctgtcacacaattctccgacttcatcatctgtaaatccaaagtactctgccaaagcccccatatctgtcatggaatattcagtgaacatattaagagcagaatgtgaaccatattttttaatcggcagtatacctgtcatgtatgcaagcgctatatagtccttatccttaagccagcctctcaaaaaatcaaggtatttcttctgtgcttctttatcctgcgtaaattctctaaacaggcaatcccattcatcaataagaatcacaaacggcctgcctgtagacataaaaacatcctgcattactctcacaatatttgacttgtcccgaaaaataatatccttatactctattgaaaagtcatccgtaatgtattcacacagcattttgagcatatcatcaacactgtgtgtaacgctcaaaaattcctgcatattaattttgagtacatcatacttgttaatatgcctgtcatacgactcatcatgactgattttaaggcctttaaataaattttctgcatcagtctttcgaccataatatgctgaaagcatatccatggccattgactttccgaatcgccttggacggcttacacacatatacctttgtaatgtatttatacacttattcgtttctttaatcagaccgcttttgtcaacaaaaatctctgaatttatcgcaagctcaaacgatcttcctgtcggattaacgtaaatgcccaatgaatatgcctccttgttaatatgttactctttattatacctgctatttgctagtttgcaacaatattatctgatgtattatttataagccgcgttattgctataaaaatagacttaactactaattctacaataacgcagcatattatgattgtgtataggttcatatgctgatatttcagtccacgctcccacgagaggagcgacctcaaactctttaagcttttctatcttttcagtatttcaatccacgctcccgcgagaggagcgactctgcatcacaacttcaccaccgcgtgtgaccttatttcaatccacgctcccacgagaggagcgacaattagcgaggtgtaaatatatgagatataaaattatttcaatccacgctcccacgagaggagcgacgacaaaccgaaaacaatcactgtagaggttacggatttcaatccacgctcccacgagaggagcgactttctccgttgctactttaaaagatgatatatccatttcaatccacgctcccacgagaggagcgactattatgccatattacaaccaactatatcagagcatttcaatccacgctcccacgagaggagcgaccacttaagtattcataccagttctttccgttttatttcaatccacgctcccacgagaggagcgacccacttcatcatattccatatcagacgggatagttatttcaatccacgctcccacgagaggagcgaccatagctttatcttcgtacaaaccaacttcgatatttcaatccacgctcccacgagaggagcgacattaaatttttacgcggagacggttttgtccttatttcaatccacgctcccacgagaggagcgacatgtagttgggtgtatgcctacccatgcattaaatttcaatccacgctcccacgagaggagcgacatattaagggcaaattcgccctcaatccaaaggatttcaatccacgctcccacgagaggagcgactcagcgttacttcttcctgtacgcttcttgtatatttcaatccacgctcccacgagaggagcgacgcagggcggcgacgacgtggacgaggacggcgaaatttcaatccacgctcccacgagaggagcgacattttgcgggtactcccatacgggtacaaagctgtatttcaatccacgctcccacgagaggagcgacaaaagtacatttttggtaaactgcgcattaaacgatttcaatccacgctcccacgagaggagcgacagcaatattgcacaaaaaatttgtttatttttatacaataccgacaataaatatataataagataaataacaagtaaaaccaaaaacctattattcattttattgtacaaatttacaagtaatttaaggtgcgagacaaccggtacattcatgtttacttatctttcgcaccacattttataatatcaatgtctgatcagcaggaattccacggtcaacaccaacatgctctatcttcgtctgataacgatttcctaaataatagaatctgagactatccacatctttatcaataagatccgttaatatggcctttagcatcacacattgagcattatctagtatacattcaaacacagaattctgaactcttcgcccataatttacacattgtttagctacttttctcaacctggtttttccttcagcagtttcagtattcacatcatatgtaatcaatacaagcacaccatcacctcatttccatagaaatacagggtactcatccaaatcttcccttaaatatcttgccaacagcattgcctgcacatacggaaccattccccattccaccttttcattaagatatgggtgtgtaataatctcctttttcttattttgccattctgataaaagctttttacgaatatctgtatccatcaatacagcaccgttttctttttttataaaattcttaccgtttacaatctttttattaatcaatgataaaacaaatctatcagccatgactgctcgcaattcttctataagatctaatgaaagtgatactctaccgggacgttccgtgtgcatgtaaccaacatagggatctaaccctacaacctctagcgctgatgtaatttgagttgtaagcaatgtatacgtaaacgacaacattgcatttacattatcaagaggcggacgccgatttctcccttgaaagaaaaaatctttcttttgttgtaaaatcaactcatcaaatacgccaaaatatatacttgcagcttcaccttcatatcctcttaactgattcatagactgtgaattttggatataatcaagaaattctttcagctttatagatgctttttttaccttatccacatctatctgcattgaatgatctctaattgctctttccagaacccatcttgaattatacacttttccaagaatacagttttttgcgatttccaggcactttatactttcactactgctttggaattgttgtttccttagcacgacatttcccttaactttgcctgaaactcttgcaagaaatttcccctgtggtgtcagataacaaagagaaatatttctatccgcacaagctcccattaatgccggacttgttcctctatatccaaatgaaactattgcttcgagattgtgtaaaggtaatctgcctatttcatttttatcatcatatacaacaacattttctccatccaaccccagataactattttccgatgtaacatacaatgtattcaataatttcttcataacgtttcccccagcatcttattgatatacgatttcaccgaaccacttttatcaatctttggcatacaaatatcttttaaagagcaagatacacaccctttcgacgttttgaccttaggtgtataatttcgatcataataatcatgcatttctccaaatatttttttcacttcatcccgaagttcatctgtaaacactatcggttggcgtcttcttgtctcaccataaaatatagcaccctccgctatttttgttgaaaacatttcttccagacacatagcctgcgctattaactgaagttcatcttcgtttgactctttgggtttcccctttttgtactcaattggatataatgaatatgttccacgatgtccatagagcttcactccatcttcacatttgtgaaattcaacaatatcacactccccactcacacccatgcttcttgaggatacaggaagatctctgacaaccagaatatcttttctcttttctgtcagatatggatcatgcgcttttttatgcataagttcgccaataacagtatgttcattttcagcccactgctgctcaacatgaataagcgcccattgtcttctgcaaaatttaaaatgctgtattccagaaatcatcagataatcatcttgagaatattccattaaatcatccttttcacttctaccgtatccggtatctcatcatcattaatagtaactgtataatcctgatattttcttggatattgtatatcatcatttttctgtactttaactgcatcaaataatttataagcaggacagtcaccaagctctttactatgtttaaaaacaataagctcacgaactgccatctttcctcttgcagcagaatggtcattttcaaacatatttattactgcatcccataacaattctagatcctcctcagaaaatccagtaacttttcttgcaagatttgctgaaatataaccttctacacgatacaagccatatggaacaatactctttcttcccatctcgttactcttattctcagcatctttttctgttgtaatggcaactctcgtaatagttacctcctgactaataacaggatcaatacttcttgcaaatccaagctgtacaggacctcttacctgcccacaattcaatgaagctttaacaaaagttgtcattacagcaccaaatgcacgaatatcataaaaatttctgcacatataatcccttaattttatatctgcatccttatctgacttttttagtttttttaatgcttctgtaacctttttatcttcatcatcatttataccaagacttttgcatgcctccctgtcacttctgttaagaggaacattctccttgatataaattttatatccatcttcgtcctccttcacagtctctatgtaatttcggatcttacgttttaaacatacatcagttacaattcctaagccactttccggatcaattcttggcatattgccagcatcaggatccccgttaggatttccattttccacatcaaataaaacaacaaactcatatctgtttttaataacctctcccatttatttgttctcctttttttcatacttcttttgtgtctgatgataatatcccaacatgaattttccttgttcttctaaagacaaactccgtggaaataatactaatttttccataaggtttcctattattttttcataaaaaatcttagaaccgctacctttttcacgctcaagtttttttatatgactattttctaatttaaataaaattggaaaaacagatgcaggcgtagcacatgctgaattaaaatacctgtctttaattgtagcatttattccctgattcgcctccttttggattgactccaagactgaaaataatcttcccaatacgtatgcagtgtcattgcatgtttcttctaatcccatgtagttttctccttccttccatgaataattttttattaaataagccttgataattgaagctcgtccccatgtaacatttccctgctcagatcgtattctgataacagtgtctgtataaagacttgcaggatatctgtttcccgataaaatactttgaagtaccattgcagacatattagggattggagtcttatcctttgaattaggattgacagtctctcttaacaattcatatacgctcagatatttcttttccacccacaatggtttcacaatatccaaccgtttataatgttcttttatattttttaaaatatcaccaaatgtgttttgataaaagaaacgaacagataacctcgcagcattcggtgcaaggcataaaatataaaatgactgctcaaagtccatcttaacattatctacatccacatatcttgattttttcaagctgtcaaatattctttgaagctgttcctcattatctacatgaggattcataacaaaactaaatgttttctgatattcttccatgccattttcagcccaataaaccaccatggaatcacctaattgaaatatcttatccctattactcaacaaataattcaatgcagttgtatatgcaaactccgcattttttcctacaggtgcattatagctctgttccttgccataagattcaaatgccggtgcattaaacgaaaccaaagcagctccacttgtctgtgctcctggaacaccttttattccacgatgaattcttgctatctccgttttttcaccagttgcaagacaaataccatcattggtattttctgtctgatgtacaacatagttgtcccaaatttttttaattgtatcattatcctgtgcgaaatcatttcccatacaaaagatgacattaccaccctcatttaattcatctgatttttctctcacacatgcattatcataagccgtctctggatcccataaattaaaaaaattacaaattgcatttgccataggctcatcaacattctttaacaacgctaaatgtttttccttcgctgcctgaaaacactcctgcacccttgcatttgttccattttgatcaatccctagcatgtattttacattatcacagagaaaattagctgccacgcccgatgaacgtgtaaccatttcaggaacactcttcgcaaccggaagaaaaaccttcttttttccactagtctgttctgtttttagtggataaatttctttgattttcccattaggatttaaatctattgcataagaaaccttggcctgacaccagcctctcttcggcaccagattattctctgcaagattctcatattctttcactaatgcctgtaagatcatcttatcacctcacagtcccttaaatctattactccacgcttcatcactgctctaaaaaacattggactgatattgcctctttcacaatcactataatccatatcatatagcataaatcccaaatctttctccggaatattatcataaaatgtatgtatatctttctcttcacaaaggcaaaaatttgccggaaactcacgacagccaaaatatggcatatgatgacattccccacgcttaagtcttctcatcataatatccttaaatttcccgggattatctgtattatttgctttttccgtcatctcaaaatgtgcctctataacataagacacatccttcaaaataagagatgccctctgtacaatatcatcctttgtacttatgtacaaaggcttatccgcaccattatatacctgtaatatattatttgcggaagctttactttttatctcatttcttctgacactggtaaatctgattggatttttcacatagattttatcaatcacccaactcaatcccggatgccaatatatcgcctcaagtattccccttgctgccgatggagtcataacatcatatgagcatctctcaaccttcatttccggtcgtgagaataatgcataatctccccataccttaactcttacacctactcccatttacaggacatctccttcctcataacaagctgcaatgtagtctcgtggctgataataaaaatcggtattataatttgatatcttgtcacttatccacgaatgatacactttccatataccatgaagtatctcatcatcactaaaacaatcctctatcaatctctcatatacttcgccaatatcccagtaatccggaatcctatatttacaatcatgtatattatcataatttccattattcatactgcattccgtaataaactcatctgcaactttttcaattggttcgcaatggagaatatctgcatatttatatatacgtttaatccgttcttttgtcagtaaatcaaccacctcataacgtttccttttaatctgcctgccaatatattcaatcagactgcatgtatagaatagattattattatttttaaccgccataaacaacctcatttccaacatatctcaaagtactaagcgcacttaccgtatgaaaacttatttgatgagtcggatgattaaacttcgccagttcccaaaaagctgctctgcttatctttccatcaatataattctgtatataattatatattgtatcatcagccataggtccttcaacaatatcatacgagtgcgctattcctcttctgcaatcaacaataaaatcaagccattcttctgtcattttttcaaatacaagatacttaagctttgaattttcagtatattcatatttattcaaatagcctcgcgttccatatctcgttgcccatctcactgcctgctctggcatctgtgtgcaataaaacccaaaataaaaatccttgttataacgagctgttctaatttcaggaaattctactatttctttacttccatgatataaaatcatcaccctactcctttatctaatttatttcacgtacattatcttcttatgttttaaataatactacttcaaacattactaatcaacacttttcaatttttatttaaaattttattgaaataattcaattcatattgtacaattacatttgtcaggctaatcctgtggattgaaataataatatttttaataatgcaaataaatggctgtgtttataattcacacagccatttaaattacagatataaatccattccagattccacagacaaatttaatcccttgtcatctgtatacatttcttcatctaccaattcataaaaattctctatatccgatgttatttccttaattataccagcaccatacaaagtatcaaaaagctgattatatatctgaacacagtactgggatgcctttctcattctggcttttccataaccctgattttttatttcaaataataaatccttagcttcctgctctatcggaataaatacaattcttgtattttcctcaatcaaatgaaatttttctgataccgtctcaaaattatatttccaatccttgaattcgcctataatattctttttatccaaatcattttctctaaaatgatatagccttttgaaatattctgtaatgcattcaagattagaaatatcatgataatcttgcaataaccctttagtgattgagctttgcagactttgtcccggcactgttttcattccatttatatcaaaaatataaactttactgttttcttttttctcaattccttctcggttgcatctacctgctgcctgtattaccgaatctactcctgctacttgacgatatactgaattaaaatcaagatctactcccgcctctaccaaacttgttgaaataagcacacatgattttgatttatcactcattctttctttaatctgtgcaagtatctttttacgatgcttaggatacatacttgttgataaatgatacacaccatcaccacttaactgttcgtaaagctgctgtgcacatttttttgtattaacaatacacagtgctcttttttcagtcttcaatctttcaattaaagtatcaaattcgattatcccaagattttcgtatataactcttttaaaaaatttaaactgctcatttatattcgggcataattcaatataccgtctgtgttgatcaaatatactgtctaaggccggttgtgttgccgtacataaaacaatacttgtcctatataaatccattaaattttccatcatggcaatgcatggtttcaaatattccaatggcaacatttgtgcctcatcaaatataaccacagaattcgcaatattatgaattttcctacacttagatgacctgcttgcgaataatgattcaaaaaattgaacattagtcgtgacaattacaggtttatcccagttttcgctggcaagctgcatcggttttaattcttcagaatccccataatcgacattacaatgattctcaagaacattatcctgcccaagtatttcacgaaacacctgagcattctgttctataatgctagtatatggaataacatatataatatgctccatttgatgcctgactgcatgctttaacgcaaatgccaatgaggcaattgtttttccaccacctgttggaacagtcaggtgaaacaatcccctatcattctcacctgctatcagacaggcttttaatatctcagttcttctaccgtttatcgaattaagatcatcattttctaaccatgaaccaatatgtctttccagtcttgctaataaagatgccatttcttcacccgatgttcgttccacatggttattcttcataaaactttctgtttcaagaaagtccgcatcaacaagacatgaatataacatcctcataaaaatccccattgaaaaatgaggattttgtgttttacagctctcaaaaggatcactttttatttgtggaatttctacctcctgtctatatgcctgataatcacatattgattttctatatcgttcttcaagcttatagtaatccattagtccagaatgatgtcctgcaatagcatattgtaatatagaataatatccacctttttcattacataatctcattccagcagtagaatggtctactctgtcattcgtattaaactgtattttatgttgaaattctttggaatacttacctagatcatgtaacatacctatgcaatatccccactcatattttccaaatgattctgcaaattttccggctaatttggcagttccatccaaatgatcaataagcctttgctttctttcttcttctatatgcgcaatatattccatttatatcaccagattcatctttacactcccacaatctcatcaatcatcctaagctcttcctcagagaagcctgtgccctccataacctttaagttttcaagaatctgctgtggctttgaggcgccgacaagcacgcttgtcacgtcatcatcctttaccacccacttaagagccatctgtgctagtgtctcaccacgttttgcggctatatcgtttagcttcttaatctgctcgatgtgtggagtgagcttttcctgatttaaaaagcggccgtctgtctttatacggctatcctccggaataccgtttatgtaacggtctgtgagcatgccctgtgcgagcgggctgaaggagatgatgcccttttgacactctcttgctgcctgcttcaagccgttttgctctattgtacggttgaagatattgtatgaattctggttgatgataaacggacatttcaaatcagtaagaatctcgcaggctctcttcatggtctcgccgtcataatttgacagtccgacatagagtgcttttccgctttttactatctggtcgagtgctcccattgtttcctcaagcggtgtctcagggtccattctgtgatgatagaaaatatccacatagtcgagtcccattctcttaaggctctgatcaaggcttgcaatcagatacttgcggctgccccagttgccgtatggtcccttccacatatcatagcctgcctttgagctgatgatgagctcatcgcggtatgctgacagatgctccttcaggataagcccgaagtgcttctctgcgctgccgtattcaggaccatagttgtttgccaggtcaaagtgagtgatgccatggtcaaaggctgtgaagcacatctgcttcatgttgtcatacgatgaaaaatcaccgaaattgtgccatagaccaagcgatacaacaggaagcttaagtccgctcctgccgcatctgttatatctcattgtgtcgtatctcttttcgtctgctgtgtacatatttacctcccgcataaatacatgatattttacccgataaattattatactacagcagacttgatttttctattgttaaataaaatcctccgtcagctttccatgcttctcataatttgtcacacgcgctatcttgttttcatcatccacaaacacaaccttcggatgatgctcctttgcttcctccggtgtcatctgcgcatagcacatgagtatcacatggtcaccgactgcaacctgtctggcggctgcgccgtttaagcatatcatgcctgagcccggctctccggcgatggtgtaggtctcgaatctgtttccgttttccacatcgacaatctgtaccatctcatactccaagatgcctgctgcctcaagcagctttgtatctacagtgatgcttcccacgtagtttaagtcagcctgcttgaccaccgctctgtgtattttgcccttaagcattgtataattcattgtttgtacctcttttcaataatcgtttcttgtccgtctacgcaataaaattgtcaatcagccttgtctttccgatatagacagcaattgccacgagtgttgttcccttaatctcatcaaccggtgtaattgtttcaaaatcaaccacatctacataatcaattcttgcaagcggctccttgtttatctctgctgtgattgcatcctttatcgcttttgcactcttttcgccatcctctacgagctgctttccgatttttaagcttctgctcagtacaagcgctgcctgtctttcatcctcacttaaatatgtgtttcttgagctctttgccagtccatcctcctcacggatgattgggcagccgatgatttctgtgtcaacatttaaatcctttaccatacgctttatgaccgcaagctgctgtgcatccttctgtccaaagtatgcacggtcaggtgtcacaatgtgaaacagcttcaggacaactgtctgcacacctctaaaatggataggtcttgtttttccacaaagctcagttgtgaggccattcatatccacatatgagcagaagccgtctgcatacatctcctcaggctcaggatggaaaataatgtcaacgcccgcatcctcacaaagctttgcatccctgtttaaatcacgtggatagctgtctaaatcctctgcagggccaaactgcattggatttacaaaaatactcactacaaccttgtcattctcgcgtcttgccgcatcgattaagctcttgtgtccctcgtggaggtatcccattgtaggtacaaagccaacgcttttgccctcttttttccatgcctttactgcttctcttacctgttcgatttgtccgtatattaacattttatgtctccttattcttttatttttcgtagctattttttgtaaatattcttcaatactattttcgatactaatacagcttgtcaattattgtctcatccatcttaaaggtatgctcctcaccagggaagcttccctcctcaatagcctttttgtaggctgtgaacgcctcattcatttcttttccgacctgtgcaaactgctttacaaatttcggcttcatgtttgcatacatggcaagcatatcctgatatacaagcacctggccgtcgcagtctgctcccgctccgataccgattgtaggtatgcttatgctctctgtaattttttttgcaagtgcctttggcacgcactcgagcaccactgcaaatgctcctgcctcctcgaccgcacgggcctcgtcaagaagcttctgcgctgcctcttcacccttgccctgcaccttgaagccgccaaatgcatttactgactgtggtgtaagccctaaatgtgcacataccggaattgacgcatccacgatagcctttatctgtggacatacctccttgccaccctcgagcttgactgcctgcgcatggccttccttcacgagtcgtcctgcattgaccacagcatcataaaccgatgtctgatatgacataaaaggcatatctgtgatgagcagcgtatcctttatgcctcttgaaacagctgcgctgtgatgaatcatatcctccatagtcactgaaagtgtatcctcatagccaagcaccaccatgccgagagaatctcctactaaaattgcattgattccggcctcatctatgagctttgctgtcgaataatcatatgctgtgagcatcgtgagcttctcgcccttttcctttgcctgtttaaaagttactactgtatttttcattgtccaatccctctgtctttctgcaacaatccgtttcttgtaactacttggaaccattcacggtattgtcagcctcttagcaattccatcatctgagtgtaatccttatcaggattctttttttcagcaatatttactagttttgtaccaagcattttgtacaatctgacatcatcgctatcgtcattttgcatacatgcgatgtgctttttcactgtttcaatatcgtttctctcgattggcccggtcagtgcgccgtcacagcctgcttcgagtacgttttcgatattgcgcatcacaagctggcctgtagctcttacagcctcagcccttgtaaagccgcagtcctccaaaagagaatagcccatgtcaaggacagcaatcacctgattgctcaaaatactagccgctgcatggtattttgcctttttagcgccatcaatgcggcatacctcatttccaatagaacaaaacagcccggatattgcttcaaccgcagcatcctgcccttccactgtgaaaaatgctttatttaattgctcatatgatgaaaatttgttactgaacggtaacattggatgaattgaacagcatgatacgctcatgctctcccttccggaaaatgaatcggatgataatgcgccactgcaatgacatataatctgattcgttagagacagctcttttaattgttcccaaaccggtataataaatgaatccggtgtggtgataaatataatctgtgattgatccgccagttgctttagcgaatcaaagctctctgtccttgtaaactccgcagcctccttagccgccgcagaatccacgtcataatagcctgcaagctctatgtcctttgtccttaggtatttacctatagaacagcccactctgcctgcgccgattatgcctattttcatgctaccaccttctttccaagccggtcagaccattccttatctcgcagctgatataatctccgccatgtgccgtatggcagcggtcgatttaccctgtgcgcgcctgtcactttgctgtctgcttcatatctgctacagcaatgtgcttttggcttccttgtgtctgccggatatgctctgtcataaggtgacaacacatcctccatgatacagtttccttcgaataccgttcgaagaaaactataccacattgactattatttaacaatccctattttacctcagtcattttgatatactcatactgcggcttgaaattctctctgtcacagagctcatagtaatgcataaagattctctccatgacatttggaatctgattttcctgtggttcaaatagtatgataagatactgcattgagctgtagcgcgtgcagacatccacctttctgatcttgctgcggatagactgctccatgcagtcaagtgccttctcaatttcctcgatatctgcaagctgctccggcagagtgttcatagtcaccatgaccagatagcagttgtgcttgtgcctatctcctacattgttcacgaactcatagattcttgcaaactctctgtagtttaaatccagcgcacctgtatagctgccactctcctttaaaagctttgccacgtttcgtaaatccgcactcagatttgtattctccttattgtcagctaagagctgctcatagaagaaatatgaacccttacagttctgcttcacatagtaaagtgccttatctgcctttgtgtagtcactttcaaacatggctccctttgtcgtcatgcacagtcctgctgaaagagcggcctcctttatctcacagtctgcttccctggcgctctcgaaaccttcaaatatgcgctttataacgctctccacgcttgccctgtcagaatatggcataaagatgaggaactcatcacctccaagcctgcaggctgcaaaggtctcattctcagtctctttagcaaggagattacctataagcttaagtgccctgtcacccgccttgtgaccatgcacatcattgacttttttgagattatccatatctatgaaggcaagacagccatcattatcctgcatcagggctgctattacctgctgtccacgacttcgcatgtaaagccctgtcagataatcaacactatcggctttttcctgactgctcatggtcttcatgacctcagatatgaatttgtctgccactgactcgatagccgcattatcacggtagccctgagccgccggattatcctcatcaatcacaaccatgccattgtcaagcatatcaacaaacatactcgaaatctgcggatcaaactgagtgctgcagttatccaaaagctcccttcggatttcttcatctggcagggcattcctgtaaatcctgcgcgacctcatggcatcatagctgtccgccacacacactatacgggcagaaagcggtatctcctctcccaccagtccgtcaggatagccctttccatcgtagcgctcatgatgattccttgcaatatccaccagatggtctaacagggtaatatcctttaaaatatctgcgcccatcacagtatggctctttatggcggcaaactcttcatcagtcagcctggttggcttatttaaaatagtatcaggcacgccaatctttccgatatcatgcagatatgcagcatttctaagattttccacatcatgctcactccagccaagctgctttgctatgagagcagaatactctgcgactctgtattagtgacctctcatataatcgtcctttgcctcaattgtagcagcaagtgtcttcatcatctgaagggaaactctctctgtctgatttctaagcttatcactctcttccttctggcgcttgtattctatctcgctgattctttttattgtgactatgatattgacaaacaaaatcacaataaggcctattccgataaataaacctgacatggtgacaacaaagtacacagatgcagcctctataagcgctagaacaagtgccacaatcatggcaaccatctctggtctgtatcccaaagccctgtgtttaattatatcaatgataaatgttgtgatgacgaccacgcagcagacagcaagcattccctgtcctgccggcagagtctctatataatcgcacacaccaaaaagctgcaaagctgtgcagacaatgaaattcacagccgcaagtgcctctatgcctgtatacactcttgtataacgcccaccctgtatgctgtcaatataaatcgaaacagcaataggactaagcagaataaccacaaagcacatggctgccataacagatgcattcggcaccagcatctgacgcagctttgactcaccgagcatccacgccgctcctaaaagcagacaccagcccacaaactccatgtcaaagtgtgtcttgtatacaatactgagtgctatgctgaacataatggccactatagctgcaaaaagaatgaaaaacgctataaccgtctctctggagctgttatgaaagatatttgtccatatatcgctcttatctccacagtatactgtatttacaacgccagaatagttggatgcatggctcgtcagctcaatgcgcagctctttgccggcatcatcctccgacatattgcaaaatacatatctgctcgcggaatccttaccgaagggtctcgtgtcctttgtatcatactctgctctcagactgccatccacgtaaaatctgattgtctgaagtgatgctctgattgccatgacacttgcattgaaatcatcaggcagaacagtagttataaccatcgtatcccccggcttgacatcgtacctgccgggtacttcaatagcctccctttcaccatcggacttctcccatgtaaagctgccctcgtaggtgatattattatcacttacagactggcttctctcactcggtaatatgcactcggcaattataaatccaacaatcaaaaaggccatcattaaataaaacaatgacctctttgtcctactcacactgtatctatccataacttatcctattccgcaaacataaggtctgctttataatagtcaggttttctaatgtcgcagatgggaattcagacacactatgcagtctgctgttcaaccatggtgttgatttccttgctgattttgtttacatacatcatgattgctacacctgcagcaaaaatcactaccgtgacaataattccaactgctgaaaagcacagctggcttaagtatcctataaacggagtctttgcgataacctgccctttaactaccttatatgatacaccatttccatcacgaagtgcaatctcttttgcagaagaatcattagaatctacataataagaatcaacccttctggctgatgaatcagctgattcgatggctactatattgccatccttgtaagatgcctcgtcgatagtctttaaatataccacactgccatactttgagatatttcctgtgtgatctgtgcccgaaagatatgtatgatagccaaatatcggtggaagcacaaccggaagcactgtaagaagtgccacgatcacaagcacatagcccagtattgtaagccctgtccttttaccctttttctcgtctactgtctgattgttgttagtgtttttactcatattaagctcctttctgttcataaaccctgtattactacaaatggagtatttccatgtagtctgttgcatcagccgctacagcagcctttttctgcatggcaagcgcctcatcaatgagatgcggcatagccagtgtcaggttgagtgcctccgccatatcagcgtactcgctctccttaaatgtattcgtgtctgcggtgtaatatgcgttgtgcatggtctcctcatagcccactataagcatgttgtttaagaaagctctgtgaaccgcatccactatctcaccctcgtgattgatatcgaggtagaaatcacacttctcaaaaagactatccagcacggacatcttcacattagggtagagtgacacattgtcatactgccctgccgacataagcttcgacgacatctctgtgatggccgccacatgaaaatgcatctgtggcatgagcgacgcaagctctgtcagatgacccacattctctgaattggtacatacgagtatgtgcggcctgtgcttattttccctgacgaagctgtagatatatccaagctgcttcaccttatcggaaggagcgccaagtgctataagcctgtcgtaggactccctgcgcgacacaaatacgcgctttgccctcgttccctgatcatgcagtataatctgcatattgcctggtatctcatcacccaccggctcgtgccagaagagtgcgtcgcgaaagccgtttggcgcaagcgcctgtgatgcaaaaaacggatatgacagcgagttgaaataaaccgctgtatcctccagccctgcgcacctgatgaaaaacgctataaagtctgtcttacttctgaaaatccagtccttatcctgccatctgacgagtatatcaccggtgacaaagttttccactatcatctccctgcccgtcacatcaaaaaacttcctgagtgccttctgcccctttttattaaaaaccgtgtgacagaaaatcgcgccatacctgttataatgctctgaaagcctgacctgaccggcatcatcgagccagtcaacaatcttaacctgccgcctgtgcgtaggctccgtgaaaaatatcctcgctcgctccctggtacggtccatgacattcgcagatgaattatcgccctctatgcgccagtaatcaggaatctgtatctgattgaaatacagcggcttacccggtaagctgtcagctttcctgtaatcgcctaagaaaaatccatacacgctcatcacatcatccggcaggaaaccgtcatcctcaatgactgctgcatgaaaggcagcaccggcattcttaaatgactcaaggagattcttgctctcgcctgaaaatgtatcaaagagcagtgtgataccatccgccgtgtgtgttacttcaacagctctatccatctgtgaaccacctccttagtcagatattctttggccttctcatatgaatgtcctgaaaatgcatccatgtcatcctctgtaaacatcctcactatacgctcagaaaggagctttatcttctccttctgatccatctcatcggtgattggaattttgtagccgttttgcccatcatcgataaaggtctggttgccatacctcacatcaaagcccactataggaagccctgagcctatggcctccatgagtgtgagcccgaagccctcactctgtgaagctgccacatatgcatcatagtgcttgtatacatcatctaatttctgctgtcccatcaaatgcacataatcggcacagtccagccttccgataagccccttaagcttcgcctcatcgccaccctttccatatatgtcaagtgaaatgtcaggcacgctttcttttgcctttacaacggcctccaccagccagtcacagtgcttctcagtcgcaagacgcgacgcagtgatgagcgagtgcctctttcttggctcatccggatacttaagctcatccagactgcccaccggaatagtcaccacttgaggctcttttccacaatacttcttgaactgctgcctcataagctcattctgcgcatctgtcgctgtgatgtaaaaatctatgtgctcagtctgtgaaaacgaatactcataatagttgttccacagtatgtaatcatcatccgtgccgccctcgctgaaatggtccgcatgcaccactattcctacgcgcgccggtccacagttttcgaggattgcctgacctatgcctgtcgtcctgtcgatgatcaccacatcatcagccgttaagttaagcctctttaccatatagccgaccaggtcagccttggtgtagagcacctgcgctcctatcctgtaaaaggtgctgtcatcctctatgacctcctcgtagcacaccgagccatcctcattgaaaaatgtcctgccgtacagatgcgccttgccgtcgagcggagcatagtactcgctgaaggtcctgcaataggtgtaaaaatccttcctgatcaggcatccgtttgagacaatctcgactctgtgcactagatcacttgtatcatcaaccatgtagcaggtgtagaacctgccgctctccttaaactgatacctgcacgtcttgccctctctggaaaaggtataatcctcctctgccatcgcagcctcaagctcctttagagtgaatgtgacgggcgatgtcctcacatctgtaaaaaatgtgtacagccatatcacttcctcatccaaaaagccgatgtttcttgtcatgtgctctatattttcagttggaaacatatctgtgaaaataaaccttgccggaatgtgcgccctgcgaagcagattcgctctgtagctctgtgcgtactccacgccgcttgaagcccagcctattccgagattgaagttatataccatatgattctcctcgtatctgtcaaactattgatattacagtgtctgctttttctccatatttatgaatagttacatctatggatatataatctgcagcctgccatccttgccgattttcacgtcactaagtaaaatattccttatgatattacattttaccgctttttctgtatccaaaaacgactcgaaagcctcattttggtattcaaacataacatttctctgtgcggatgctcttcccgctaccgcatacttgagctgctcaaggtagtcaatcagctcaacccagccatcatccaccgcctttagagttgcctcgcggacaaactgctcgtaagcctcctcatcacctatgcgctcacgctgtcttgaaagcccctgatacacgcgaagcatcaggtaatcgctaacagtggcggcgctttgcatgtcagactttgacagaccggcgtccagcttgtaggagatgttgtcaagaatgtatctgttaagcatggatgtgtattgctgtgtattggtatttttatcgctatctttctttctgccacggcgcctgccatgcttcttattactctgtatgcagtcaaaatgattaacgaagtctgagatattctccttcgcaatccctactatcttctcctcctcgacacttgcaccgtcgagcaggttttttctggttgcgtagattaggtctcgctggcgctggaggacctggtcgtactgcagtgatttcttgcggttcatctcctcagactccacactaagcttctgacactggttgacaatacgctttattttgcgctttccaatacgctttttgccatcaatatagcgctgcagcttgtcatcatcctcagctcccactatgtcatcctccaggctcacatagtactggctgaagcccggatcaccctgtctaccggcgcgacccctcgcctgcctctcggatcttgaattgttcatcctgcctatacctatgacagctaagcctccaagctccttcactccgtctccgagctttatatctgttcctcttcctgccatcgttgtagcaaccgtgaccgcattcatttggcctgcgcctgcgataatctgtgcttcccagaaagcattgcttgcgtttagtacattgtgcggaatatttttctctattaaaagccttgaaaaaagatctgtatccgtaacggaattaagcaccacaagcacaggctggcctgtctcgtgaagccttatcacatcatccactgctgtccagaactggtcatgaccgtttttaaagtatctgtccttcctgtcaactcttttaagaggcctgtttgtaggtattctcaccacatgcttgccgtaggtctcaaaaagctcatcctttgcatccatgagtgtgccgctcatgcctgccatcttgtcaaacatcataaacagattctggaaggtaactgatgccacagttctgtattcctgcgatatctccaccttttccttcgcttctatagcctgatgctgaccgccacgcagcttgacaccgtgcatgagacggcctgtcgctccatcaaacagctctacctccttcttgtcagtgacaacataatcctttttgttcttcaaaagcttgtgcgcccgaagagaaagcgtgacatgcctgtttatctcaaaattctctttaccgtagaaatttgatatgccaaagaagctctcggcaaacttcacaccctttggagtaagccagacggccttatcctcctctatatagtcaatatcctccacaagtgtcgtgacgaaaaaatcacatacatcgtacaggttcgactgcactctcggcactcccgatatgacgagcggcataattgcagagtctaaaagcaccgaatcagcctcgtcaattatgacatagtggaaatcacagagaaatctgtcctcctttttctttaccagattgtcaaaaaggaaatcaaagccaagtgtgccatttgtagtgtatatgatatcagccgaataaaactgtcttttctcgtcatcatcctgcttttttgtatcatccgcatccgggtatgagcagctaagacccatgaaattatagacctctcccatctctgcaccatctcgcgatgccagatactcgtttgtggtcacgagcatgcagctcttgcctgtcagcgcattcagataaagcggcatcgtagcagatagagtctttccctcacctgtattcatctcagcgagatatccaccgtgaagagctgctgccgctatgatttgcacatcatacggtctctttccaagcaccctgtaatcagcctcgcagatagctgcaaaagcctccggcataagcgattcaagcgattccccatcgctatacctgctcttaaactgctctgtcagtgcagaaagctcttcatcacttagattttttattttttcttcgctttttcttacttttgttagagtcctctttaagtctctcaattctttcctgctctgcatcaaactcttcctctgaaacctctttaatcaccagtgatttgaatgtaaaatcagcatttccaccatttatcagctctatcctgtagctgtaggtcctgatggacggcttgaaaaacgcctttttatcgcggacaataatactctgcgcctgtacatcatacctgtcaaaaaatatgatacgaagcatcagtgcctcactctcactgttgtgatagtcaatattcaccgcaatggaatatgcccgctctccatcgatgagtggaagcgacggttctatcctattcccctggaaattcgtcatagaataccatgtgtgaatcaccgtgcccggcggcatgaggcggttcttataagagactgaaccatcctcattaaattcaattttagatccatatacatacgagtccgatagaaattctttccagcggacctgccaagtgtcaccatacataatacttacctgtcttactattgttcacttaatgtttgttttcctgttactgttcacacctaactgtgtgacctgcaacgtttatttgcttatcttgaaaaatcatcatgcagcagattattgtactggctcttgaaccatgccataacatttgctgaattgtcagtatgtctgccgtgtgagcccttgccatacacctcaacaccgctcgacttcagatgcgacaaaatgctcggataaccatccgggtcgtaatcatcctcatacagatatgagatgatgaactttgtttgcgaccagtcggcactgtcgaatctgtcccacatcctgttgtttagctgctctatcgcctcgtcagagagattgtcataatttttcatcagaatatcaagcgaggttgcaaagcctccggctctaagaattcgttcgtttcgtgctacatttcccatgttggcaagtggctttgcaagaagcagtgcatgtggtgaaagctttgagccatagtagagtgaaccgaaggttcccattgaagctcctgagagcacgagctcatccttagtaaggccaagctcattgagcttatcagtcacataatccgtaatcatctgctcgaattcactatctcccagataaaaggctccaccctcacttcttgggtctgtcacaagaataaacggacatccaaagcctcgcatcatatagtagccctcaaagccctcctgagtcctgtagcctgagaaatagacagcaagcggtggcttcatatcgcccttctcaaagtatacaaacacttcctctcccttagaggagacaagcctctcacctcctggcaggaaaaatccgtgtccacggcgggaatgtctgtcgtgcaatgatatgatattcaggctgccggtgccccttgcaaggatagaaacaaaaacaggaccctgatctgattcattatctatgcaaaaaacatcctgcagctgttcctcgtcaagctcccagacctgcttaatatcaccaatcgagccgtagtagaactgaaataatctaagcttaatctctacatcacctgttttctcatactcaagatacatatcaatacactgtccctcaaaaacagggatattgtatctccagtatgcaatctgtgaaaaatcctcaccaaactctccctccaaaagcaggttatagtttccttcacatgatacccttcctgtaaaagaatcactgatagcaagcttggccggattaaacttctcaccatacggattaggataataatttctcacctcatgagccagaaaatactgcacatcgccggtatacagatactgtcccattcgtgccttgaaatatctgctcgtcgcgctgtttagcatctgcacattttccgtagcaaaaagacagtagccccttgtaaacttcgtaaatttcttttcctctgaaagtgttatatccctgtcaagaataactaaatccatgagctttctcgcaggtctgtttgtcgagggttcactctcatcagactcgtacacttcaaactctatattgtccggaatgctgtatttagttgtccaatcgtcattgccaacatataaaacatgaatcttactcactgaaatttagcacctttctccacttcttaagcagcaccgatgtggtatatttctgaccaagctcatagcactccaccaatgcctgattccagttttcaaagctgtccagataataggtcagactccttccgatatcagaaaaatcatctatgaccattccgtttttccctgaaacaagaaactggtctgcactcaggctgattctcggcacgcccttgctgatagctgtgacatagacgaacacatccatcgtgcctctcatatcgaggatgactctctgctcgttgatacacttgctgatatcacgctcatccacacatacatccacgaaaaatctctgctccaccgttttttctatatcccccagctcattctcggcaaatacatcagccccgctgcctccaaagccgagagctgcctcaccatcgcctgttaccaaacgggaatcatagcccatactatcaagaagctttaccgtatcattctttatagcatcctcatgaccccatgaggcatctcttgtaaagaaatgaactctcgcaaggtcattaatggtcagataatccgcaagcccctttataatctgagcaaatgcatccttagtcagtccatcaaccggcacgaggatgttctgcacccgaagctgcgagctgataccgaaatccatcctggtatcatatggtggaatatctgtgatatgtaatctgaacggcttgttatttactgcacccagatttgccataataatcttcgtcgtataatcagaatccgtaatgatattttccgcatgctctaaaaaatccgctgccagtgatgtctgcgtgaaatcaaatctgttttcaaaaaatgtagcaataacccttttccccttaagcacatgctctgcaaccctgatatgaagcggatgcatcgccacgaaaaagctgtcaccctgccttgtgagatttacatagcttgcaaatacctcttcaataaccgcctcaaggctgtcatattcagcctttgtaaagcgtatctcaaccggctcacctgctttgccgctcttagcatcaggcaccacatcatagtcagggcacgttggattgacaaccacatgaccatcatttttatactcacgtatcttccagatgccgttttccatcaaaaaatcctgatactgctctatgccgttttcatatataacagtactggaaacaaagcctctgtcatcataatagttgcgcctgcagattttgccatcctcaaacatatctatggatatcggattgccatcctcaccaaactctacctgtgcatacttcacatcgccctgcaaagcgattatagaaaaaggcgaatacacaaactccagccccttcggccacttgatatcgtgatatgacagcacagcgaccttctttctcctgacctgtgctatcgcatcaaagcatgaccagtactttgagcggtacatgccctgcctgtgtaggaaatgtctgaaatttggcgagtatccgagcacaagaatcctgtaaggcctgtccacatttctatgaaaaagagtaatctgctttatagtctcgtcaaactctgacttgagcctgcgcatataccactgctgctcgttttcgcaccacatattctgtttataccatgccggtataaaatatagcattatgattcctcctaattcttaattcaaagcgccgggagctatataaatgtatgatatctgtccatattccggtacacctctgcctcgcggtacagcgaaatccaaagacctgtcgtcatcatgatagagcacggcagcatagcaagtgatgcgtccacatatcctccaaactgtaaaaacagcggtccaccctgacatatacagataataattgagcttataacggaaaagctgagcactgtgccaatcagatatctcttcgtaggctttccggcatatatatcctgtattgaatcacccgacttaagcagatcatctgctgtcctgcccggagacagcataaccatagaaaagataattgtaagcagacatataatcaccatgtatactacaattccaagcggtgatgtgagcctcatattgtccatccaccactgaatatcagcattgtccggaaacagataatgaagtccattgcacataaactgtggaagcaaaaaagcgactgacgcaaacataagcggtgtagcaccgacaggattgagcttgtaagcgatatagttcttatccgcataaatattgtttatggaaactctctgtactgctattcgcttctcagtggtctcaagtactatcatgacagcaatctctgccactcctatggctacaggcagtgccagcttctcaagcggctttcctgtaaacatggtcatcataccactgactatattgaccatgaacacactcaccttgccaccgataccatacctggtagctctgtcgcacatatacaccactatcagcatgcccgcgatgagctgtatgaaaactattatcttattccatataagttcatctccactaactctatacataagtgtctgtgttttgtgatatgcctgaactgctgcgataatcatcatgatggtaactgtccatatgtttatcttcttcggtgacagctttcttgtattgtcaagcgacatgattgcaactatcagtatggcaagcatggatgccagcatgtacggccacaagcctatgatgaaaatggaacagttcttcatattacctgaaatagcctgtaaaagtatggactgcgcatctacgtttacattgctatatgcatctatatctatcccgtagagtggtatatttctgcctaccatgtacacgagcatggtcatgaacgaatataaaagcttatataacaatacgtgttccttctgttgtttttgttttttcttctttatactatctttctgcttcaaggaattcacctttcctcacaaagtaatctcgtcttactacaaaacagcttaacgaattagtgaccatccgctacagatggtcactaatattataaaacaatattgttagtattgctattaattatttatttctcatcagaattatcttctgaatcgtcgctctttgcaggttttcttctgcggttgtcataaacaccctttcctgtgatagctgcaactgctgctgcaatccaccaccaccatgttttgataccgtccttggctgttccgcctgctgcaagaggtgtatcctcatcctcgatgttctgaagattatcgtcttcctcatttactgcaagaggaacctgtgcatcctgaattggtgtattctgtgctgccggtgccgcaggagctaccggtgtagctgctgcaagaggtgtagcagccggtgtgatagttgttgcaggtgcaggagcattatctactgccggtgcaggagttggagccggtgtcggtaccacatttgcagctgactgactctgactcgtacttgtgcttgtgctgatgctctcgcttgtgctgagtgactcacttgcactggttgattcactctcacttgctgatgtgctctctgactcacttgcgctggttgaggcactctcgcttgctgatgtgcttgcacttgtcgatgcactagtgcttgccgaggtacttgcgcttgttgaggcacttgtacttgctgaggtgcttgcacttgttgatgcacttgtacttgctgatgtgcttgcacttgtcgatgcgctggtgcttgccgatgtacttgcactcgttgatgcactcgtactagctgaggtacttgcacttgttgatgcgctggtacttgccgatgtacttgcacttgttgatgcacttgtgcttgccgatgtacttgcacttgtcgatgcactggtgcttgctgaggtacttgcgctggtcgaagcactgatactagctgatgtacttgcgctggttgaggcgctcgtacttgctgatgtacttgcacttgtcgatgcactagtactagccgatgtacttgcacttattgaggcactggtgctcgctgaggtacttgcactagttgaggcactcgtgcttgctgatgtacttgcacttattgaggcgctggtcgatgcactagtgcttgccgaggtacttgcgctggttgaggcacttgtacttgctgatgtgcttgcacttgttgatgcactggtacttactgatgtgcttgcacttgtcgatgcacttgtacttgctgatgtacttgcgctggttgaggcacttgtgcttgctgaggtgcttacacttgttgatgcacttgtgcttgctgaggtgcttgcacttgtcgatgcacttgtacttgctgatgtgcttgcacttgttgaggcacttgtacttgctgatgtgcttgcacttgttgaggcacttgtacttgccgatgtacttgcacttgttgaagcactgatgcttgctgaggtacttgcacttgtcgatgcgctggtactagccgatgtacttgcgcttgttgatgcactagtgcttgccgatgtacttgcgcttgttgatgcactggtgctggctgaggtacttgcacttgttgaggcactggtgcttgcacttgtcgatgcgctggtacttgccgatgtacttgcgcttgttgatgcactggtgctggctgaggtacttgcacttgttgaggcactggtcgatgcacttgtgcttgccgatgtacttgcacttgtcgatgcgctggttgaagcactcgtacttgctgatgtacttgcactggttgaggcgctggtacttgctgatgtgcttgcactcgttgaggcgctagtacttgccgatgtgcttgcgctggttgaggcgctagtgcttgctgaggtacttgcacttgttgatgcgctagttgaagcacttgtcgatgcactggtacttgccgatgtacttgcactcgttgaggcactcgtgcttgccgatgtacttgcactcgttgaggcacttgtgctggctgaggtgcttgcactggttgaggcgctagtacttgccgatgtgcttgcacttgtcgatgcacttgtgcttgccgatgtgcttgcgctggttgaagcacttgtacttgctgaggtacttgcgcttgttgaggcacttgtacttgctgaggtgcttgcgcttgttgatgcgcttgtgctggctgaggtacttgcacttgttgatgcactggtgcttgctgatgtacttgcacttgtcgatgcactcgtacttgcacttgtcgatgcacttgtacttgtacttgcactggtgcttgctgatgtacttgcacttgtcgatgcactcgtacttgcacttgtcgatgcacttgtacttgccgatgtacttgcgctggttgaggcacttgtacttgccgatgtacttgcactggttgaggcactggtacttgctgaggtacttgcgctggttgaggcacttgtacttgccgatgtacttgcactggttgaggcacttatgctggcgcttgtcgatgtactagtgcttgccgatgtgcttgcgcttgttgatgcactcgtacttgctgatgtgcttgcacttgttgaggcgctagtacttgccgatgtgctcgcacttgttgatgcacttgtacttgctgaggtgcttgcacttgtcgatgcactagtacttgctgagatacttgcgctggttgatgcacttgtacttgccgatgtacttgcacttgtcgatgcgctagtacttgccgatgtgctcgcacttgttgaggcactcgtacttgctgatgtacttgcacttgtcgatgcgctagtacttgccgatgtacttgcgctggttgaagcactcgtacttgctgaggtacttgcacttgttgatgcgcttgtgcttgctgatgtacttgcacttgttgatgcgcttgtgctggctgatgtacttgcacttgttgaggcacttgtgcttgctgatgtacttgcacttgtcgatgcgctcgtacttgccgatgtacttgcgctggttgaagcactcgtacttgctgatgtacttgcacttgttgatgcgcttgtgctggctgatgtacttgcacttgttgatgcgcttgtgctggctgatgtacttgcacttgttgatgcgcttgtgcttgctgatgtacttgcacttgttgatgcactagtgcttgccgatgtacttgcacttgttgaagcactggtgcttgctgaggtacttgcgctggttgaggcacttgtacttgctgaggtgcttgcacttgtcgatgcactcgtacttgctgagatacttgcgctggttgaggcacttgtacttgccgatgtacttgcacttgttgacgcgctagtgcttgcttcaacactcaaactctctgatattcttactgattcactcttctcatagtttggatctgcactatccaataaatcaatggaatccccatgcttatatgcgtatttatacgtatgtactccacctgtactactacttctaaattctacccattcattatcagacacttttaatacaaacgcatttccgtcacatatatacaattcacctgttttattatatctagtttcatcccaccaaggtccttctgtccaattaaatgtcacagaattaaagtcattaaaatattcccattcattcgtattagaattttgaattctatatttacaactcgacttttcccattttccaaatgaatgattttcctttgtttggattaaattgtactttgttccaaacaatgtatcccccttatactgcgaataattactttccgtaatcttagtcacatgatgtaccttatttgatacacaaccatctctatatgtatcattacttgcaagctgcggcattccactcattcgagcataaacagccgtatcctgttctgcatcatctgtgtatgtagccgctacaacattatcaccactctgttgttctgcatcactctgcttagcactttcgctgatgcttgagctttcactggtactttcactttcacttacactcacgctctcactctcgctagtgctctctgaagcgctttcactcatgctctgtgttgtactctcgctatactctgtacgttcgctctcagacaaagagcctgcgtcaactaatgaattggaatctgctgccgattcattaattgcagccataaccatatcagccccctggatagagctgactccacccatggcaattcctgctgcggttataccttttaaaatactgtcaaccttcttcttattcatatagtctctccttattcacatgaatccggatacttggattatctgtttcctaatcctctttcatccggacataactatagttttcctctttaacactataaatataaactcctaggtgtatctaaaatcgtataaaaacatttatataccgccaaattatagcctttctccacacataatcaaggtatccagcaataattttctggtatatattccatttatgaacaaattttgcagttttttgacatttgcgtagtattgactcaatttatcttccgattctgatacagctatccggtatacatcttcaaaatctgtcgctgctgctcctatttcattatctatcacatacttttcacagctcaacccctttttaactatcactgggattccggcagccatataaagtccaagcgcctgttcatccgcatcccaaatcaatccaaagcctccgtctgacaacctgagtatagattccatggcacggtactcatcatattgcaccacctctatattcaaattgttcaatggatattcattttgactcgtttccgccatgatatatagttttttatttttatgctcatttgcgcaaatgtctgtcatataatccggtatattctgaatcagataaggtttttcttttaatccatttgcgatatagtaatcccgcagcgcagctgaggcaaaaataaacatatcagccctgttaagcagcgtgatttcatcacgcaaagaatactcactgtcatctctatcggatgctatttcctgtataaacgcaacaatttttgttccatgatatcttcttaaatgctcaaataaaaatccatcgtatctgggactctcaccgcttggatgctgaaaaatcactatatcctccggacaaagtgatgcgattatgccatccatcctaacatgaagctcatcatcactatcatatgcatcaggaaatttaaataaactcatttctttaaagccaagtgtttcaccagcgtttttcactgcattttgacggagaccaatcaatccgcctatgttataagtttttgtaatatgtacgctcataatctcttccccattattccactgtagcaactatctgtgattcatacacctgatcatggtcaaatactatatcctgtcactgttgatttgtctgctaaatctatatatgatcttgatatctgttttcaaccggtgtacaggcattttctaaaacctcaattattgcatcctgaagtgtttttcttgtatatgcgccatctaatatcagcttttgaatattcttcacattatggtaaagctttatatactctgcatccgtaatactctgaactagtttatcagcttcatccaacgtatcgactgcatatcccagaccgtttctttcgacaaatttctcatgaacacagcctctttttactataactggtatccctgctgccagatttgtaccgagcttgtacggctgattcatcgaataatatctgtcaaaatattcgccatcactccaaacaagcccaaagccacctttggaaagctcatgcattagcttttcctgctcaaaataccctctccagcaaaagctgtcatcattttctctgtccggcttatttgcatcatattgataaatcggtgtcttgccatggtactctgccagaaacggaaaacgattatagttcccggcaaagtgaaaacatctcgttacagcatgatccacaaaacaaatgtctgatggcatatcccagatagtctgatagataacaggcttctcatcaagcccattttctttcagatagcgatgcatcttctttgatggcaaaataagtaaatccgccttattgagagttttaatttccatatcaagaattgcctgctcagaatcaaacatgagcttttgtatatcctgaacaaaaattatcagctttgtatcccggtacgactttatcttgtttacaaagctctcatcataattcaccccaatccagcttggatactgaaaaatcacaatatcaccatagttaagaggcgctattatcccatcaagacgtttgtctatctcctttgcatagtctggctttaaaggataaaaagacaagcccatttcatgacagccaatactctgcgccacctttaatactcttctatgtgccagactggcagttcctgccatgttgtttagtgtagtaatgtgtgttttcattgatactcctgtctacaagcctgttgtttcattgatgttttccaacatttttctctcatactcaagccaataatccttaggatgttttaccttcatgttactgcatttctctataaaattaagtttgacggattgaggtctagtatattttttataagctgcatccattttgattctattacatgctccttatattcttcagcaatcatataagaattttcatgaaatttcttcaatctgtcatcatcctcaaatattttaactattgctgctgcagttctttcacagagcttatctttattttgaaaatctgtctcaatatcaaaatccacaaggtatccattttcatcctgatgtataaaaagcctgtttccatatctgacatccagtccaaccatggcaagtccgtctcctacagcctccatgagtgaaagtccaaatgtttcccacaaagaaaaggatgcaaacaattcatagtgtggataaatcttttcaagattacagcgccctttaaagtgaatataatcatcagcacatgcatctttaactatattttgtaaatatgaagtatactcatcattgccacttccatatatatccagattaattgtctgatttatctcatgagcttttatcacacttttaataagaatatcaatacctttccttggactaagtcttgaagcagatattatactgcctcgccaacgattatttttacttttaattttgccttctggtatggcgcccggtggaatagctgcaatatgcggaacaaaacaatcatactcttttaaaaatgcttccagacttcttttatgttcatccgtaccaacaacaaaataatctattgcctctgaatatttgaaccagtaataatactcatagttcatgtataatgagctttcatcctcatatattttgtaaaaatgatctgaatgtaatacagctatcagctttgatttgcctttattttcaaaaagaggctgtatataatcaagatatcccgctctatccattatacatatatcattctcacaaagattaagttcctttataaatctttctacaaacgctacattgtctataacttcaccatttttaaacagatattcaacattatctttatagatacattgttcataaaccatctgtccttgtttgttccaaaaaattctcctttccggatttaagccatcgctcgaatcattatcccaattatacagctctgtatatgacaaactgtctgtataataattttctaaatacttttttccgtttttaaagagactttcatttataacaaatccatcttcatcgcataatatttcaactgatttttcaccggaattatatagacgaatcacctttccatcctcatctatattgtcatactcatagttttctttttcattttctaaaagagcttcttttttcacagacaaactcatatctaatcttccggtcataaaaagatgtgcagatataatctgaccacgttttattttttgcgaaccatacagttccatatccctaattgtcggcagctctgtaaaaataaatttagcgtttacattgttttttgcaaacaatcttgccctaaattcctgagcaacatctactccggaaaattcatatccactaagtaatgtaaaatcaaatactctcatctgtatcacccataactacttttgcagctaattgttttaattgcatcttctgcctgtctatatattcattgaatatcgtcctactggttattatattttttagagtttctttcatattcacatagttgctgctatcaaaaatattttcaattggatataattcttttgaatgtactgtattgtcaaacgctagtattatcatgttatttatcagtgcctggtttactgcattgtatagttctctgtaatgattgatatccaaataaatatcgcatctttcaaacagttcttttatcttctgttcagtaatacacggatataactcgacattattatttatatccagttttgttaatttatctgacataatagtgctggcagctatgtgaaatgttatttccggaaagtcatttataagctgttcaatatactcgagctgatccgtttccgtaataataaatgcttcttttttcccaaattttgatttattattctcaagatatgaatataatctgtcgcatttacaatttgaattatctttataccaattgacctgctgctcttcactgcacagtattcgaaacgctgtgttagtctgagttattactgtcaaatctgagtttaatctattttgtggcaggtatgatattttaaaattaccataatcccaggcaaatttatttaatatctcatcacttgtcagccatatattttcatcataaattttattatatttaagataagcttccaaataatcagcaaagcctctatagctcttcggactaatgcgggtgccaaacgtggtatatgtctttggacctgtctgttctaatactttaatgtcaccatttctatcatagaattccctgactgtaacattgccgccactcacattctccgaacaatacatatatccgtatttgttgtaataatctattctatatactgtattattcctgtcaatccactcgactctgctgaccattcttttctctatcggattcttaaaatagatgtttgcctttttggttttattatcatatatagcaccatttagaccatctgcacgaacactccaatattgagggatatctatgaatgcataatacctgtctttttccttaagcacatcgtttttttcagatatgccacaaaacaaatctatggcttctattgttttgcattctttaaatcccatattttctgccagctctattatatttttctcaaacttacctaattcatcagtaataaaaatcatagggcaaacccaccctctgtataatgtaaaaacctctgtgttataaaataattctcgccattttctaatccggcatttgcaagtatttctaatccattactatcgtccgcatccgctgaaactatatagaccgtattatcatcacagataatctcattctcctttaaatgctcatgccattcacagctatcgaattttctgtttaatagcctcattgcattccttatagagctattctctccaccatagaatacaagtcgtatattgttttgagtagctttttttagcagcttctccagcatagctgttctatccacaattctgcccatagaattacacaataagccatcctccatctgctctccccatggggttctcagtattgtgaaatagtaggctctgtcaatttcattatttgtatgcagcatcaacagggttgcagcataatgatatatttttttctctgctttctcattattttttcttgcctcatcaataaaataattccatttttcatctatcaataaggtttttccgctgaatatggcatttaaagcatcctggtcaggaagccatgtccgtggattatcgttcagataatctataacctgttgaaacaggcttccatttttcctgatattgtcaagattcatgcaaagaacacccgcattaaaatatctgtcacgacttgtctgccctgctgctacagcgtatggagttccccaatttcttattgtcgaacaatcctgagcagccgccagacagtaattatctatatttaggttccataattcttcaatatctgtatttacaaataaatcagagtccaaatatattattttttttaaatccggcataatatcgggcaacataattctgaacattgttccaattgcaaatctattcattgaatcagcaaacgtgccaaaaacgtccgaattaaaatgatgaaattctatatcatttccactattatcagcaataagactcagcttatttttatttatttcgttcaatgtgtcatcatgtaatatatgaaaaactattggcgcttttgtgttttcaacaatggattgcatcgttgttccagcccagacactgtaatttccatccttatcatgtataccaagacagatatgcattgcattatccaaaaagtatgcattatccatttttttcgcagttactctcagccttgacattcttttcaataccacatcatctgaaaaaaacttcacatatggattattaaatatatccggttcactctttaaaaactcttctttgcaaatatccagttccctattcataaaggtttctattctactatatggctcaatatattggtgccataacaaaaatgtctggatttcacaataacactgctcaattacatttcccagttctgcttttctactttgaatagcctgccttatatgatccataataatcttagcatcccggatctttgcattgctaatttcagaacgtataatgccctctgtattctcaaagtaatagtataatgtcgattgcaccttacaatatttctttgcaagtaacacacaaagcatagaaaaatgtgtatcctcataatatacatcttctataaatcttagattatgttctattataaatttggttgagtatagctttgcccatgctgttacattagtaaatccggtcagacctataatgagatttttcctattatcaacattatccaaatcaagcctttgaatttcaaaatcatttacttctaatacatttggcttatctgctttaaagcacgatacaccacactgtgccacatcataatcgtcctctgtcattctgtcatacagcaccctgagcatatccggatgcacataatcgtccgcatccacaaatgtgatatatttgccggtgcagatatccattcccagattacgtgcaccgccacactttccttttttctgtattttaagagatataacattctccgggtattgtctttgtaaggattctaatatagaccatgtattgtctgttgataaatcatctatgagtatcacttcgagattttcaaagccatatgtctggctgtaaattgaatcaaagcatctcataatgtatttttgtacattgtagcatggaataattactgatatcttgtctttaccattcataacattttctccataatatataaaataatcaaattagtacttcctctaatcgtgtaaaatcaccttgtagcttttccaacctatttgtactatttcctttacaactcacaaactatactgttcacatgacatttctctgcggctctcggatttttctttgcgaactggcggttgattctctttttcactatctcgcagtcctcacgcttgattccgatgagcatgataagaaactgcacctttccatacgaggtatatatgtcactgtagcggattgattcaccaacgcacttcttaagctgccttgaatacttgttcatctttgtctcgctctgtacctgtctgccttcctcgtcctccagagtacagagcatgagatatacaggtacccttgtgcgcttcataatacggatggacgcctggtatattcctctgaataccggatagctgcagaaatatccacctctttctgtttcctcctgctcgttcatgccctcctggatgttttccagtatctcatgtgcatgattcatctgattactgtatttctcaaggatttccaagagtcttgaagatggataaataccgcactccctgagataatagtccacgacatccgtgtatagctcttccgcctcatcatagcgcctggtctctaccatcgcctccatgatgagctcctcccactcattgaatgggtcgacctttgccgcatatactccgagcttctccagtcccttgaattgttttctctttcgcagtatatacgcagcttcatttatgattttctcaaacataatgtgatagcgtctggcctcctgtgctatccacgtctcgcctgtatatgccgccaaaaactctcccttatacagatatagtgcttttatgtacagctcaagcatattgtcttctatttcctttatccgctcatcacacactgtctctgcactctccggttcatgtggcatctgcttttccagtgcacaggcctcgttatagagcttctcaaactctgctgcatcctcttctatctctatatccggagtccagtaatatatgcctccctccaaatatacgaggttctttcccggcagtccaagctgtgcgagcttttgctttgtcttgtatacaataactcttagtgccgtgtgaggtgcatctatgtcacgctcaccgattactatttcctcgagcttatcctttgctattccgcagtcagaatagtgtatcaaagcctgcatcatgcggttgaactggctttccttatgcattttttccgccacaaatggtgctccgttatagtccattctgaaattgccaaacatctgtaccttgattttatgcgtcataggtgcctctcttcccgagttttataaacctgcttattatagaattcatattatcattgactcatatattcagctagtttttaactaaacaaattaatctaattatcattatacatcaattccgcgcatggcaataacaacgacaatttacacaaaaagtgtcaaaactcgtacttgacaaatcgtaagatatatgatagctattcaaagccagaaataaaaaaagatcctgcaagaaaatctcacaggatccggcttttcagatatattaaattagaaaatagcatttacaattgttgaaccaatggctgttgcaaggaatgccagtccacacacgagtggaagcttattgtcatcctcttctattgcccttactccaaagaatatgcttacatatcctactactcccgcaaatgtatgcagccagccgctcacattgccaaagaactggaatgggattatgtcgatgattgctgccacaaggataatcggaaggtatactgcatcatacagacatgctgctgaaagtgtctgtgcaaatgtcacctttttatccttctgcactgcgtttaatacaaccagaataactgctgccaggatgagtactctcactgcctctcctacgattcctgagaagattccctcaaagaagctcgccgggtaaaatgagaatccaaagccgcctatgctgccaattacacttgataacagatatactacagacagcactacttctactatggcaaataagccaataaatataaagcctgatgccatatttgcattctttacaaagtctgctgcagcctgtgccggcttcttaacaagacccttgtagaatgtgatgatagatgccacattcttgtcattctgcagctgctgtcctgctgcactcacctgctgtgtgaagttatcaaacgcctgcgactgtgcgctgccctgtggctgtccattgaactgtccctgtggctgtccgttgaactgtccctgtgcactgccctgtggctgtccgttgaactgtccctgtgcgctgccctgcggctgtccgttaaactgtccctgctgtgctgcattatctgcctgtgcattgttgtcctgtgtctgatttggtgtctgtggctgtgcctgctgacgacatgtgcatacctcatcatcagctaactgcctgccacaatttgtacagtatttcataactgaaacctccttaaaataattaataaactgctgataactatattagcatttcggatatttaatagcaatatttatttgatatttattccatattatattatgattatttataatcattcacattctacagaggaataaacatgccacaaacacttaatatagctgtatgcgaggacgaagctgcagagaccttgctgctttgtgatattctcaaccacagcgatatccaaaatacatacactgtctttactgatgcagattcttttcttgcctcatatgagtacggaaagtatgacctgctgctcatggatatatacatgaaagattccatgaccggcatcgaggcagtctccataatccgcgagacagatgccgatatcccggttgctttcatcacaacaagcacggagcatgccttggaaagctacaggctgtctgccatcggctatatcgaaaagccggtttctgcagctgagctaagtaacattcttcaccttgccatgctgaagaaatccgatgccccatctctttatgtgaagagaaacaagagtatggagaggcttgccctttctgatatcatgtacatagagcagagagccaggcagattttcatacatttaaaagaaaatgaggaaatcagctgctatgagaagctttcagagctttcagatcagctgcccgctgagctgttttttctgccgcacaaaagctacgcggtaaacctgtcgtatgtcacacgcattgatacttcactcaaatgcttcgtgatggccgatgacacaaatatccctatcaagagagagctctccggcaaagccaaaaaagctctggagagatactactttgagcacaccagagggcttaaataaggcactttcctattgatttgatatgagctagactgtcaaaagtaatacactgcaaggagcccggattatgaaaaaaattagcgctatacgaaatattccctatctgacaattatactgcttacactgatttgcatactgcttctttcctcaaaaaacatgattatgagccaggcgagctatcctgaagccactatcgtaagctctgcctatgctgtggtggaaggctcggattcagataaagaagaaatcacatttccacatacctttaagcacctttcgccgcgcacacatgtcaccgtcacaacacatatcaacctgaacaaggatgatcctatctacataaaaactgtctattcccctgcgaaggtctatctggacgatgaactcatatatgagtttggcctggccgaaaactatccatcctatatgaaggatcccgcaaccgaggggtacctgataggcactgacggtcattcgggtgatacagagcttcgcatagagtatctgtctcctgttaccagaagctcgcttacggtatattctcctatctacggagcatacaaatccttatttttcactctgttaaagctgaataaatggtcattctttatagcactgcttgagcttgccgcaggtgttttgtttatatttatctcgctgatgcttttatactacgataaagaggtttgcaagatgatatttcattttggattcttctcactcatggccggcatgtggtctatcggcgagtgcaactacacaggtgtcataatcaaaaaccctacactgctttatctgtgtgcttttatagggcttttctcgcagatgattccgctgctgtatttctgcaggcttgcagttggttttaagaatgacaagccaattatagttatcgcgaagctcctcaccgtgcttgaccttgtcgcttgtgtcttacagcttagcggtacggtggcactatctcagagcatgtacgtgttccatgtcattctgcctctcatactttgcttcctgactgcatacatcatccttgaggctgttcgcagccaaaacagcagggcaaaacggctgatggttccggtattcatactggcacttgcttcatgtgccgagataatcaactatcatttaaaatttgtggcctcattgtcattgctgtaccagattggaacactgcttttcattataatcatgggaattgtaatggggcttaatataagcgatatgctcagtataaaacgtgagaatgaaaggctcatattcgatatgaatctccttgagcattccctgttggagcagaagaaatataattcgctcatcacaacaaacgaacagctttttaagaagcagcgccacgatctgcgtcaccagcttgttgcaataaaaggcctcgcaaacactgaaaataaacagctgaatgaatacctggattccctgatccacagcataccatctgcgcctgcaagctattgcgaaaacagggtagtcaattccattctgtcatactatagtgccatatgcagaaatgaaaatatcgctcttgagacaaagcttattgttccggaaaccgatgatgcggccttggacaatgacctgtgcctggtatttggaaatctgatagaaaacgctatagaagcctgcagacgcatggatactctggattcttcagacgaaacaccatcacgttttatccgactgcatgcccacgtacactataagacacttattattactatggacaacagctttgacggacatgttaccatccaaaacggaaaataccgttcttctaagagggacgactatggtataggtctgtcatccatccgctctgttgccggcaaatatgatggtgacgttgcatttgaagcagctgatggtatatttcagtcatcagtataccttcaaatatataaatgacacactaaaatcattaatttatattaatgcttcatacctaaatatcattttcagagtccaactaacttattgtatataatgcatacatatgctataataataaaagaattttgtgcattatacacatatggagttttaatttatgatagaaaacacgatatacaaggaatttattgataaaatttcagaattatcagacgggatatatcctatcatcaccgacctggataatgacttatcttacgtaccggacaagacagctgattttttcggctttgaagccggcgagcatacatgcttctttgaacagctgagctcttgtgtcaacgacgttgacctgccggaatataagcgggaaatccgctatcgcttaaatggtgaaaaaccggatgatatattttatgtccgcatgggaaagcataccaaagaatatatgatgggattttattctgatatttttaccggtgatgacggacaccgctaccatgtcctcgtgctcagaaacgaaaatacccttccggatatcgacccatatacatatctttatggtcagtcaaagtttgaaagagacatcaacggctatatcatggaaaacaggtctgtagccataatcgaggtggagataggtcatatagatgagttcaatatactttatggttccaatttcaacactgcaatccagcgtgagcttgcgctcaagttcatctacatgatggatggcagcaccgctacctactatatgaataattgcaagtttgtatttgtggtaaaggaagcagaccgtgccttggccgagtccttctatcagaaaattgccgatacaataaagtccatgtatttctttaaatgctttaaatttgagtttgatatatatgctgcgtgtctgattctcaaggattatgatggtgatacctcaactgtcatcagcaaggtagagtatactctagaccgtgcgaaggagcttcacagctctgatttgttatttttcaatgatatggtcaggttcaatggcagctcgcatatagatatcatgaaaatcattcatcagtcggttatcaatagctgtgatgggttttttgtagagtttcagcccattgtaaaggcttgcaatggtgaaataatgggtgctgaagctctggtacgctggaaaaaggagccttttggcacggtgccacccggactgtttatcgactggcttgaggataccccggctatgtatgagctaggaaattatatcatgagaactgcaataagcgcagccagtgaatttgcaaagataaaaccgggctttttcatcaatgtaaatgcatcctcagagcagcttgaaaaggaaaactttgtaaaagatactctggcaattcttaaagagtatgattttccaccttcacagctgtggatagagattacagagcgatgcagagatctgcctatatctatgataaagaaaaccgtcactgcattcagggaagccggaatccacatcactatggatgactatggcacaggaagctcttcatctcagatgatgcttgagcttcctgtagagggtatcaagatagatatgttctttgttaaagacattctcgaggagaaaaagaagcaggcacttgtaatcggaatgattaattttgccaatgccgcagacttaaagatatgtattgaaggcatagaaaatgataaccttgagagctatctcaggcagttcgacgtcacctggtttcagggctatcactactctaggtctatctgtcaggatgagcttatgaagcttcttataaagccatagccctggatattactcaagattttccttaaatactgtcagtgcgccatttttctttaaaatcagcatgacaattgctgccactatgcttccggccactgtagagataaggaatggcactatgtatataaacatgccttcaggctgaataagcatcacgtattttgcaagaggatacgctgccagacctccgagtatgccagtgccaagcgcctctgcaatacatgtcggtatgatttttttgctgaatctgtacatcagtccacagcacagagcacctaccatgcttcctgggaatgccatgagacttcccagtcctgtcaggtttctgatgatactcgcacaaaatgccacaccgacaccccatgcaggtcctaaaaatactgctgcgcatatatttaccatgtgctgtacaggtgcacatttgctgccggcaacagggaagcttattaagcttcctgctacggcaactgccacaagcactcctgccatggcaatctttctgattgaaagagttctttttttagtgttctttttactttccattattacctcaccttaaagtatatcgtaactgttcagtaccttcacagttgcgagtcgtttctgtactgaatagttatagtatatcaatatactctcctgcaagtgccttgttcatgcttcgcactgcacagaacttaccgcacatactgcatgcctcgctgtggtcatcctcaggcagacggtcatccctgatagccttagctgtctccggatcaagtgcacatgcaaactgtgcatcccagtcgagcacacgtctggcatctgccatcttatcatctatatctctggctcccggtattcccttcgcaatatcagctgcatgagccgcaatctttgacgcaataattccctgctttgtatcctccacatttggaagagcaagatgctccgcaggtgtcacgtaacaaaggaaagctgcgccgttcattgctgccactgctccaccgattgctgctgtgatgtggtcatagcccggtgcgatatctgttacgagaggtccaagtacatagaatggtgctcccatacagattgactgctgtaccttcatgtttgctgctacctgatcaagcggcacatgtcccggtccctctaccatgacctgtacgttgtgatcccatgcacgctttgtgagctctccaagtcttacaagctcctctatctggcatacatctgttgcatctgccaggcatcccggtctgcaggcatctccaagcgagattgtcacatcgtgctcctcacagatttcaagtatctcatcatagtgctcgtagaaaggattttcctctcctgtcatgcacatccatgcaaatacaaggctgcctccacggcttacgatattcatcttacgcttgtgctttttaatctggtctatcgtttttcttgtgattccacagtgaagtgtgacaaagtccactccatcctctgcatggagtctgactacatcgacaaaatcctgtgctgtaagtgttgcaagatcacgctgatagtggataacactgtcataaacaggcactgttcctatcattgcaggacattcgcttgtaagcttctgtctgaatggctgtgtgttgccatggcttgaaagatccatgatagcctctgctccaagctttacagcgctcatgaccttctgcatctccacatcatagtccttgcagtctcttgacacaccgaggtttacattgatttttgtgcgaagcatgcttccaacgccctctgcatcaagtgacttgtgatgcttgttagcaggaatagctacctttccgcttgcaacaagctccatcagcttgtctacatccatcttctctttctttgctaccttttcaatttcaggtgttacgatgccctttcttgcggcatccatctgtgttgtgtaattactcattgtactctcctgttctttattttattactgttaattagtagttattactattcttattattactgctattaattatttaacatgtgcttatttcattgtatgaacaacgctccatgattcataggaccgctgccgtgtcccaggtcaagcatggcttttaaacatgctgtgacatatctcttgccgttatccacagcctgctcgagcgactgaccctttgccagaccgctggctatcgctgatgaaagcgtgcagcctgtgccgtgtgagtttggattatccactcttttggtctcaaatgtgatgatttgctttccatcccacaaatagtcacacacacatgctgtgtctgtgaaatgacctcccttgcttaaaaccggacagccgtatttatcataaacagcctttgatgcctctatgatgtcatctgtgctttcaatctgtctgcctgatatcacctcaagctcagggatatttggcgtgatgatgtcagccagtggaaacagcttctccatcagagtgtttgctgcattttcctcaagcagcctgcttccgcttgtagcgaccatcaccgggtccagaactatgttttttgccttatattttacaagacctgcggcaatcgcctcaatcgtatctaccgatgatgtcataccgattttcaccgcatccggaaaaatatccgaaaaaacagccttcatctgtgcctcgataaaatcagccggtacattcatcaccgcgtcaactcccatggtgttttgtgccgtgagtgccgtgatgacactctcgccaaacacaccgtttgcaagcatggtctttaaatcggcctgcacgcctgcgccaccgcttgaatcgcttcccgcaattgtaagtgctgtatgcatatttacgctcctttctactgaatgttgtgatttctcgtaactgttcagtatcttcaaaatattgtttaattactgtagttatagcagtatgtcatactgtgattacagaattttgtcgcatattcctgcgagttccttggctgcagcctttatatctgcgcttgcaaatatcgctcctaccactgcgattcctgcaatccctgtgccctttagcgtgaccgcattgtctgcatttatgcctccgattgcaacaaccggtatatcgacagccgccgtgatttcacgcagaagctcctttgtcataggctttgcattgagctttgtggtagagccaaacacagctccgcttcccagatagtcagcgccatcagcttctgccctctttgcctgctccacggtctttgccgtgactcctattatcttgtcagttccaagaagcttcctggcctccgccggattcatgtcatcctgtcccagatgtactccatcggcagctatatcaattgcaaactgcacgttatcattgatgatgagcggcaccttgtgctcatgacagattctctttatctcaagagcctcactatactcatccttaagccctgcatcagaatccgtactcagaatatccttgtcacggatctgaatcatagtggcaccgccctctatcgcaagcttcacatgctcagaaagcctagctccgtgcagccactgcctgtctgttatagcgtagagctttaaatcagtttcgttcatatatacctttcacctcttatcctgttgttttccaaatataagactcatgacctgcataccaattgtctgtcatacagcgatattcacatcagttcataatcaccatcgcatatatgatatactgcatcaatcagcctgtcccggtatgcagcatttccgggcttaatgaaataacagctgttagtctctctgccgtgctctgccatatcagaggcagcaagcccgcctgcactcttcatgcagctaagtgctgccgtgactgcaccgtatttatcatcgcaatcagccgcaacaaatgcacaaatgagccctgaaagcatacatccggtgcctgtcacccgcttcatcataggatggccgcctgtgatgcacatcacacttctttcattattgtcatagcaatcagcttcatcacataattctgccacataatcggtctcacctgtaatcacacagatgctgccatatcgcagggccgccctgcacgcaagcgcctttgcatcagactcatctgccgtatcggtcacttccacgccgccatcgcacctgccatgctccataacagccttgacctcagacaaattgcccttaatcacatccacatgcacctcgtcaagcaggctcatcacaaaatccatcctgaagcggctcacgcccacaccaaccagatcaagcacaataggaatgttctttttcgctgccatcctcgcagcaatacgcatcgcctcaaagcgctcctcagagggagtgcctatattcagattcagcccatcgcagatacccgtgacctcatccatctcctgcggtgccatagccataataggcctggccccacatgccagctcaatattggccacatcattgatagtaaccatatttgtgatgttgtgaatcaaaggactgcgtgacttaagcttttctatataattattcatctgtatctctttacaactattcataatcacccacacattcaaaaagcggatataccgccaatgagtatatccgcctaaaaatcgtgcgatattatcctacgttggcattatccaaatcaggttatgggtcaagacactaccagtctactctcagccggctaaacaccagctcccctattgtgttttaaaattaaatccaataacaatgtaactatccaaaacaagaaaacctgctgcttacatgcaagcatgacgcatcagctttttttgttctcagtggttctgaatagtcattatatttaatataatacgcactccccaataaatcaagcaaaatccgcaagtgtactcatattcgtacatcaagcgctgctggtcacactgttaggtgtgaacagtaaccatcaaacacaatcccggtaacaccgagccccgaggtgttaccgtagcactcattatcccgccgcaacgtaagggcgtaagccccgggcaccggggtgcacacgcactctcccgaggcgcgaatagcgaagtggcttagatactgtagaaattatgcccatgaatcgagtaggaggcggtgactaaccgccgtcctctcacagcaccgtacgtaccgttcggtatacggcgctttcaatagttgacgtgcacagactgataggctgtggctaaatcgtaaaagccactgtttatcagtctttctttattcagcgcccaaatcacagctttgttattgctgatataccaatactttctgcgactgtttgctattgttgccgcatagtgttctgggattcccagcttgactagatttttatatttcgttctaggtttcttccactgtttccatatgcacatgcgtattctgtgatagagccatccgttgatatcatctatgttgttcttcatgcttgcaattccgtagtagttaagccatcctcttgcatatactttgattttctcaaggcttggcttgattgactgacatcgcttacgggaagataactccttcagtctggacttaaacttcttccatgacttcggatgaactcggacatatatgccttttccgttccttcccaatgcaaagccaaggaatttaaaatttcggattgcaaacacgctgactgtacggctcttttctcggttgactgtaagtttcagcctctcctcaagatattttgtactgctttccaagagtctctctgatgctcgcttgctctttgcaagaagcacgatgtcatctgcatatcttatgcatggaacacctcttttcaggtattcctggtcgaactcattgaggtagatgtttgccagcaatggtgatagatttccaccttgtggtgagccttcctctgtgtcaatgaccactccgttttccattacaccgcttttcagatagcgctttatcaactgtactacacgttcatcttttacattctttcgtagaagattgatgagaatttcgtgattaagagtatcgaagtactttgacaagtcaaggactacagcgaatgtatagccttgttctgcatactccttaaccttaagtattgcatcttttgcacttctgttcggacgatagccatagctaccatctgcaaacagcggttcatagattggcactaactgttgggttattgcctgttgaagtgtacggtctatcactgttggtatgccaagctttcgcacaccaccatctggtttgggaatttcaactcgtcttactggagacggagtatactttccacgataaatgcggtcagttatctcttgttgatgttcctttagatatggaagagcctcttcaatggtcatgccatcaattcccggcgctcccttgtttgccttaactctcttatacgctctgttaaagttgtctttatacagtatcgtttccaaaagtctcggctgtgcactgtctctttctttccatatccgattgaatgacctggacgctttcacatacccttcatgttccgcattatctctttgcgaacagccattgttttcaatgttttctgccatagacggtcattcctcctttctcggtcatactcaagactcctactgattcggtccttcacctctcggctactatgacctctgctgacttctatgcgttcagcattgctttatgcaatggttacctctttcaaggcataccgcacagacctccctaggtaccacacgtttcttcctctccatccatctgcctcatttatcatgcatgattccgtgtagttattgggctttaacatgggttgctgtcttacccacatgcatgacctcatatgagatttctgttcgtcagaccagagatttgcccgtgagttggtatattcctcacatccagcttccttcagattccatctcacgatggacacccttgccttcggctatatccttcccactaccgggcggattcgggactttaacccgttagaaacgtgcgccgctaggcgcacaacgcagaaacacccctgcatggacgcaggggtgaggagaaccgcgccacggacggcgcgtttcgacggtttcgtcaagcatagaaacccatcaagcataatttcgtacagaatcttagccacgtagcgtagcgccccgggagagtgcgtgtgcccccccctgttgcccggagcttacgcccgacctatcgccacaatgataaacagcctaaatctacttagctgcaataacatccgccatatcgtagtgaccggcaccctttcccttaaggaacttggcagcctcaacagcacccttcgcaaaaacagccttagagtaagcagtatgcttaaactcaatcacctcatcctgtccacagaaaagtacctcgtgctcaccgacgatgcttcctcctctgacagcagaaataccaatttccttaggatcacgcttctctctgcgctggctgcggtcgtaaacatagtgatactcgttatccatagcctcgttgatggaatcagcaagcgcaagcgcagtacctgaaggtgcatcaagctttaaattgtgatgcttctcaactatctccatgtcaaagcctgccggtgcgaaaacctgtgcagcctttttgagaagagccataagagtgtttatgccaagtgacatgtttgcagacttgagcactgccaccttcttgtagcactcctcaacctttgcaagctgctcatcactaagaccggtagtgcataaaacaaccggaacctgcttgtccacacaatagtccagcactccgtcaacagccttggcattggaaaaatctatgaccacatcagcgtccacatcacatttgtcgatgctcgaaaaaacaggatagtcattgtctattccatcatataaatcaataccggctacaatctcgatatcagcatcagccttacagatttctgtgatagtctgtcccattttgccgttgcagccattcataattacctttgtcattttattgtatcctttctcgttgtactaggcaagctttaagccataagccttcatgacctcagcaagcttccttgcattatcctcacccatctcgcacatagggcttctaagaggtccgacattcatacccatcaggttcatagccttctttacaggaattggatttacctctgagaagagtgcgtccacaagtggaagagcctctctctgaagctctaatgctgtctgtaaatcgcccttgaagaagctgtcacacatattgtgtacctttgcaggggctacattgctccatactgagattacaccgattgctccgatagacataagaggcactacgagaccatcctcgcccgagtacatatcaagctttccgtctgtcagatacattgtctttgaagcctgtgccagatttcctgtagcttccttgagtcccacgatattttcctttgtcttaaagagctctgccatagtctccggaagcacgttgcagcctgtacgtcccggtacgttgtatacgataataggacactttgtgctgtctgcaatctgcgaatagtggctcacaagacctgcctgagtagccttgttgtagtatggtgtgacaacgagcagtccgtctgcaccaaactcctcagcctcctttgaaagctgcatagctgtctttgtgcagttagagcctgtgcctgctactacaggtacacgatgctttgtaaactctacggcagcctttataacctttgcatgctcctccattgacagacatgggctctcgcctgtggtgccggcaatgataatagcatctgtgccattatcaatctgcatattgataagctcctcgagcttgtcgtaattaacctcctcgttatcgtacataggtgtaacaattgctactcctgctcctttgaaaattgccatgattttatctccttcttgcttttctttattcggtatttgattctcttaacgtataagtatgccgctgtctgcctctaagcgctaaaaaaccggctccttagagccggtcccaattcttcatgaatcacgatagctccccatcaaatctgatgacagtcataaggctgttcgccatatgcccagagatatatccgcagatgataaatcccttcggcgctattcctttcatctcccatcaactgcccctgcggcatccggaaagctactcataagtcgcgcgacctctatctgttaatcaaattattcgtatacagcagatgatataactgcctcacacttgcactaataatatcaccacgcctgtgcattgtcaactcacatgacaatatttcttattatttttcggacgcgatattataaatctcatctgccatttcccttattccatcgtcaagtactctgcctgtcataatcacggtcacatcatcaggccttgaagcaagcatatccgacagctcctcctttgaaatcagatgcaaatccaaaagccccagcatttcatcaagcacaacaaccatgtcagcacctgttgatataaccttctttgcatagttgaagccattcttgatattcatgatttcttcctgcttactctcctcatcaagctgctcaaagaatattccggctcttgaaaaattaaagaatttcacctccggctcaagctttttcaaaaactccggctccttttttccctttaggaactgaataacgacagcctgtttaccctcacaggcagcacatattgcacttcctatagcgacatttgtcttgccatgtccctcgccataataaatctgcactgcaccgttttccataataatcatgcctccatacacatagcttttctgcctgatatataatcattacagtttacacctgatgtaaacatcaaaaattacaagcattaaccaataatatctagtaaaataccacaatctgacttttattgcaaattttctggaaaatcacaaatccgtagttactgtccatttaaaatactatgcctcaatcttgctcacggaaacctcatacgccgtgcgctgctccacctgtgtctcactgagctttttcacatagtctctgctctggattctgccccatatctgcacatgtgtacccacctcaaaggtcgacgcaaatctggcatttcttccccaacagatacatggaatatagtctgacttgccatatgagcggttcactgccacaagcaggtctgcaatttctcgtccaagcggtgttttcctgtatatagcctccttgcagatatagccgtcaaggaaaatctgattggctgcatcctcatcataatcactgtccaatacctcaagctctcttgcaaaaacagacagcaccagcctgttcttcttctcctcatgcctgttgaatgagcggaactgcccgcctatatatacgcttttgcctatgtagtcaccctccacattgataagcctctctgacaccatcaccggaatatagtccatgcaatctgaaagccttctgaccgaaacctccatcatatagaagccctcaccatacacctcgtgactaaactgaaaatctgaaacgatttctccgattattgatacctggttgttttcaaacattttatctgccatgaatttttgtctcccttccttttgtaaaatgtttttccagctatttttaacatttccacaaagtatattttctcaaataatgtcgacaaatccaataacatttcacttaattttataaaaactttcaatgaaaacttgcacattggaaaaattatgatagaataagttagttgcaaacttagctttatttattaaagaaagaaggaaaatatgaaaacaacaagagacgatattcgtaatatagcaattattgcccacgttgatcatggtaaaacaacacttgtagatgagcttcttaagcaaagcggtgtgttccgtgacaatcaggaagttcaggatcgagtaatggactcaaacgacatcgagcgtgaaagaggtatcacaatcctctccaaaaacacagctattcagtataaggacatcaaaatcaacatcatcgacactccgggtcatgctgacttcggcggtgaggtagagcgtgttcttaagatggtaaacggagttatcctcgtggttgatgccttcgaaggtgttatgccacagaccaagttcgtagttatgaaggctcttgcactcaagctgcctatcattgtctgcgtcaacaagattgaccgtccggaggcacgtcctaatgaggtcatcgatgaggtattagagctcttcatggatctcgatgcttctgaggagcagcttgactgcccattcgtttttgcatcagccagagacggctatgccatgaaggacttaaacgacgagagaaaggatatgactcctctcttcgagactatcgtaaactacatccctgctccaacaggtgatcctgatgccaacacacagattcttatcagtacaatcgactacaacgagtatgtaggacgtatcggaatcggtaaagtggataacggtaaaatcaaggtcaatcaggaggctgtcgttgtaaaccaccacgaccctgacaagcttgagaaggtccgtatcagcaaactttacgagtttgacggactcgacaaggtagatgtagccgaggctaacatcggttcgattgtagcaatctcaggtatcgcagatatccacatcggagatacaatctgctcaccggaagcaccggaggctattcctttccagaagatttcagagcctacaatctctatgaacttcatcgtaaacaacagccctcttgcaggacaggaaggtaaatttgtcacaagccgtcacatccgtgacagactccttcgcgagctcaacactgatgtttcactgcgtgtcgaggatactgactcacctgattccttcaaggtttccggacgtggagagcttcacctttcagtgcttatcgagaacatgcgccgtgagggttatgaattcgctgtaagtaaggcagaggtgctctacaagtatgacgaaaacggcaagaagcttgagccaatggagcttgcttacatcgatgtgcctgacgagtttacaggagctgtcatctcaaagcttcagcagcgcaagggcgagcttagaaatatgggctctatcgcaggcggatacaccagactcgagttccatatccctgcacgtggacttatcggataccgtggtgagttcatgaccgatacaaagggtaacggaatcttaaacaccatgtttgacggctacgagccatacaagggtgaaattgcataccgtgcaacaggttcactcattgcctttgagtcaggtgaggctgtaacatacggactcttctctgcacaggagagaggaacactctttatcggaccgggtgccaaggtttactcaggaatggttatcggacagtgttcaaaggccgaggacatcgagctcaacgtatgtaagaagaagcatcttacaaatacacgttcttcatcagcagatgaggcactcacactcgtaccacctagagtattaagccttgagcaggctatcgactttattgatacagatgagcttcttgaggtaacacctgagagccttcgaatcagaaagaagattcttgaccctactcttcgtaagagagccggtttcaagaaaaattaaatcatgcttttcgcataaagtttttgttgctgaaaagtatacagtaaatacactttatgtaaatttcaaagacaaaaaataccgtcagggaacatctccctgacggtatttttatttgacctgatttatttttacagtgccttgattctctcaagtgcctttactgtgttctcatagtttccgaaagcagtcaatctgaagtatccctctccgcttggtccaaagcctgagccaggtgtacctaccacgttggcattctcaagcaggtaatcgaagaactcccatgatgtcatctgatccggtgtcttgagccagatgtatggtgcatttactccgccgtatactgtaaagcctgcctctgcaagacctgtctttattgtctttgcattgttcatgtagtatgctacctgatccttaagctgtgcttttccggcatctgagtaaactgcctcgcctgctctctgcacgatgtatggtgcaccgttgaacttggttccgtgacggcgtgcccacatagcatgaagtgatacatcaccacacttaagctccttaggtactactgtgaagccaagacgcacgcctgtaaagccggcgttctttgagaagcttctaagctcgatggcacatgtctttgcaccgttacactcatagattgaatgtggcacatctgcttcgctgatatatgcctcgtaggctgcatcaaagatgatgactgaaccattcttgtttgcataatcaacccatacctgtaactgctcctttttgagagttgttcctgttgggttgtttggcagacacagataaatcatatccggtacttcctttggaagctccggaacaaagccgttatctgctgttgacggcatatagattacattgctccaggtctctgtctgagcatcatatgtgcctgttcttcctgccataacattggaatcaacatatacagggtaaacaggatctgtaacagcgatgcggctgtttgctgagaaaagctcctggatgttggctgaatcgctctttgctccgtctgaaacaaaaatctcatctgctgagatatcgcatcctcttgccttgtagtcgttgtctgaaattgcttttctgaggaactcatatccgaggtcaggtgcgtatccgtggaatgtagctgcatttcccatctcatcaacggccttgtgcagtgcatcgatgatagcaggtgcaagcggctgtgttacatcgccgattccaagccttattatctctttatccggatttgcctcctgataagctgcaacctttttagctattgtgctgaaaaggtagcttcccggtaatttctgaaagttatcattaatctgaaacatgtttatctctcctttgttactttacaataagtctaatttatcactttaccatgcaagtgtaaatatatttttttatcattattttttatagtaactgttcaagcctttgcagctactatcatacgctcttctgtctggcttcataaaacgcacactacacctcagtcataaggcttagtatcatctgtgctgtttccacaagaccggtgccgttatccatgcttcgcttctggatataccggtgtgcttcctcctctgagaatccatttcgttcaatcagtacagcctttgcactgcttagcatctcctgatcctcctttgaacgtaccttaggtctttgcctgagctttttcctgcgacgcgttatcgtgtaatccatcatctcaacagtctgcaaaagctcatgcacttttagtggcatggataatgacatcagattatccacatttttttccatgatccccgctgccgacgctataagaagcatctgaaactccttaggcatatactcgtatatctcactgtacatcatgtctgaaaatctgtatccgcatatgatgattcccatattcagtccgttcatgctcgaaagtgctgaagctcctgtatttgcaaccgccgtgactgtataaccgctctgcgctaatatttttttgattgaattggctacttcctttttaggaaatgctataacaatattattcacggttcgttacatcctttaaaacttgtacagatattcatctatttcccattgggtaaccgcagctctgtaatcgttccactctgcctcttttgcctctatatacttgtcgtagatatgttcacccagtatctcgcggataaaatcatctgacttaaggcactcaaccgcctcatgtaaatcagcaggaagtgattcaattccgagtctctttttatcctgttctgtgagctcaaatacattctcacgaagctctgcatccggctgtatcttgttctttatgccgtcaagtcctgctgccaggcacagtgccagaaccagatacggatttgctgaaggatcagggtttctaagctccactctccttccctcacctcttgctgcagggattctgataagcggacttctgtttgtagctgaccaggtgatataaatcggtgcctcatatcccggcacaaagcgcttatatgaattgacgattggattagtgattaccgtcatgcccttcatatgcttcatgataccgcctatgaagtagtatgcctcctcgctgagtccaagcttatcctcctcattgtcaaatatattgacaccatcctttgaaagtgacatgttgatatgcattcccgagccgctcacaccatgctttggctttggcatgaagctggcaaaaagtccgtgccgctttgcgattgtctttatagcaagcttaaaggtcatgatattgtcggcggtatgaagtgcctcctcatacttgaaatcaatctcatgctgtgcaggtgccacctcatgatgtgatgcctctatctcaaaatccatatcctcaagagttaaaaccatgtctcttcttgcgttttctcccaaatcatttggtcccaagtcaaagtaccctgctctctcatgcgagatggtggtaggctgtccgttctcgtccaggtggaaaaggaaaaactcacactccggacctacattaaatatatagcccatctgctttgccttttcaatctgcttctttaatatatagcgcgggtctccctcaaacggtgtaccatccgccatatagacatcacagatgattcgtgcgaccttgccctgctgtggtctccatggaaaaatcataaaagtgtcaagatccgggtgcagatacatatctgactcctctatcctcacaaagccctctattgacgagccgtcgaacatacacttgttgtcgagtgccttctcaagctggctggctgtaattgccacattttttaatgttccaaagatatccgtaaactgtaaacggataaactcaatatcctcctcatccactatgcggataatatcattcttactgtattttgccattttaaatctccttattattgcaaaaagctataaccttatcgtactccatcgcaccgccaaacaaatcaagagcactgcctattgtcacattcagatggttctgtccaagctgcctgatgcattttaaatcgtcaaaggatgacacaccgcctgcatatgtgaccggtatccttccccagctgccaagcatggcgacaagctccttttcaatgccgtttaccctgccctcaacatccactgcatgtaccagaaactcgcagcagtatgaagatagcttatccaaaagctctgtggtcactgcctcatccgtgaagttttgccagcggtcagtcactatataatactgtccatcctttttgcgacatgacagatcaagcaccagcctgtcactgcccacagtatctttaagcctgtttaaatttgcatagtttatcctgccgtctttaaatacgtaagatgtcacaataactgctgctgcaccggcatctataaactccatcgcattgtctgcggtgatgccgccacctacctgtaagccctgcggatacgcttcaagcgccataacagcctgctcctttgtagcctcataatactcgctgtccacagaattgagcagaatgatatgaccgccctttatgccggatttcctatacatatctgcataaaaccggctgtcctgctctgagacaaagttctcactggcaaagtcacccctgtcttttaatgaaccaccgacaatctgctttacttttccattgtgaatgtcgatgcatggtcgaaattccatatttttctccctggtttagtttattgtggccccaaaatcgttactgtctgcgccttagtgtgacatgcaaacattgccttaaagccacttaatataaaatataacataatttttactttatttgcaaaagacttacattagttttactaataaataatataataatttcatatcgggcttataactgcttgacacccactctttaatttgctatcatcatacaaattacattagtatataaagtataccagtataataacataagaaagagaggaatttaaaaatgggtactattatcggcgaaggaattacatttgatgacgttctcttagttccacaatattctgaggtaacaccaaatatgattgagcttcagacacatcttactaagaagatcgtccttaacattcctatgatgagtgctgcaatggatacagtcacagaatcaaaaatggctatcgcaatggccagacagggtggtatcggaatcatccacaaaaatatgtctattgaggcacaggcagacgaagtcgataaggtaaagcgttcagaaaacggcgttattaccgatccgttctatctttctccagaccatacattacaggatgcagacaacctgatggccaagttcaagatatcaggtgtgccaatcacaaaggacggcaagctcgtaggcatcatcacaaaccgtgatctgaagtttgagacagacttcacaaagaagatttcagagtctatgacttctgagaatctcattacagctcctgagggcatcacactcgaagaagcaaagaagatccttgcaaaggcaagaaaggaaaagctccctatcgtagacaaggactacaacctcaagggacttatcactataaaggatatcgagaagcagattaagtatcctctttcagcaaaggatgatcaaggccgtctcctctgcggtgccggagtaggtatcacaggcaacatgatggagcgtgttgatgctcttgttaagtctcatgttgatgtcatcgttgttgactcagctcacggacattcaaagaatatacttgaagctgttaagaagatcaaggctgcttatcctgaccttcagataatcgccggaaatatcgcaacaggtgctgctgccaaggctcttatcgaggccggtgcagatgcagtaaaggttggtatcggacctggttctatctgtacaacacgtgtcgttgccggtatcggtgtaccacagattacagctatcatggactgttacaaggttgctaaggagtatggagttcctgttatcgcagatggtggtatcaagtactcaggtgatatgacaaaggctctcgcagccggtgccaacgtatgtatgatgggctcaatgttcgcaggctgtgatgaggctccgggaaccttcgagctttatcaaggaagaaaatacaaggtatatcgtggcatgggttctatcgccgccatggaaaacggaagcaaggaccgttacttccaggagggcgctaagaagcttgttcctgaaggagttgagggtcgtgtagcttacaagggaactcttgaggatacagtattccagcttgttggtggtatccgctcaggaatgggctactgcggttgcaagacaatcgaagatcttaaggagaacggacagtttgtcaagattactgctgcttctctcaaggagagccaccctcatgatatccatatcacaaaagaggctcctaactacagcacagacgataaataaacacatttattaattcatattacgaggtaaaatatttggacgctgacgacatatcgcagattatattcttattaatactattagcactctccgcatttttttcatcttcggagaccgctcttactaccgtaaacaaaatacgtatgagaaccctggctgaggctggcaacacaaaagcaaaaaaagtgctcaaggtgactgagaactctccaaagatgctctcagccatccttatcggcaacaacatcgtaaatctttcagcatcatcgctcaccacctcgcttgccatcaagctgtttggcagcgtcggagcaggtgtcgcaaccggaatacttacattcctcatactgatcttcggagaggtctctccgaagacacttgcgaccataaaggctgacaagatttcactctcaatcgcaggctttatatcagtgctcatggtagtgctgacacctgtaatatttatcatcaacaagctttcactcggagtcattttcctctttggaataagacaaagcgatgccaagcgcgtcatgaccgaggaggagcttcgtacaatcgttgatgtaggacaggaggacggtgtcatcgaggatgaagagcgtgatatgattcacaatgtattcgattttggcgatgccgaggccaaggaggtcatggttccgcgtattgatatgacgtttgtccatgttgattctacttatgatgatttaatttccatattcagagaggataaattcaccagactccctgtgtatgacgaaagcactgacaacgtaatcggtattgtaaatgtgaaggatctgctgctccttaaggatgaggataaagagcatttttccatcagaaatatcatgcgtgagccttactttacatatgagcacaagaatacagcgaatctgtttctcgagatgcgcgaatcatctatatcgcttgccattgtcttagatgaatacggtgtcacagccggactcatcacacttgaggatctcttagaggagatagtcggtgagattcgtgatgaatacgactctgacgagcaggatgatatcacaagaataaatgactacgaatacatagttcttggctctgcaaatctcgaggatgtaagcgatgagcttggtctgcacctcgaatcagacgactatgacacaatcggtggctactgccttgaaaagcttgaccacctgcctgaaaaaaatgaaataatcatcactgatgacaatatccttctccgcatagaggctgttgataaaaaccgaatcgaaaaggtctatatcaaattgccaaagcctgccgaagaagagaattaaattcaggattgtttaaccagcgggagttctccatgagacctcctgctttatttttgctgtaatacaaataccattcttcatacgttagttatcctccattggctgatctgctacaatagtctttttgcagcttattttctttgtcacacctgtaggaagcttgaactcctcctctattcctgctgaaataatgcccttttccatatcacatacatagactgtggcaattgcattaccgcctgctgtaagtctctcattaatgtcctctatgacagctttttccacatcatagctgctgacgggctttttatccacgatatacatatttggctcgtaatatctgttcatagcacccgaaagtgctaatgacagactcttttccatctggttctccctgactgtcatattgtatacactaagcccaagcatcgctgtatacaatacaataagacagcctattattccaagtactacatttttcattctatacgcctgctacctttctattaattggaacacttatcctcacatgatcccttgtaccatcatagaggctgttgataaaaaccgaatcggaaaggtctatatcaaattgccaaggcctgccgaagaagagaattaaattcaggatcgtttaaccagcgggagttctccatgaggcctcctgctttatttttgccataatacttttcgcttatgaatctaatctttccaaaggctttagttctctccttgacctgagtatctgtaaatgtgatggatatagtcttttgcgtgatatttccatagctgtcctttgcctcaagcactatctctatgatatccttgtcacgtgcactttctattttacggtcatcaaaatttttcactttcagataatttatctcgttatcgccaaatgcaatatcaccatcctccacatccgttgcagatataaggcttcctatcagctgctctgttataccgccatcccttgcctgctttatcgaaaagaacatatcatccgcctctatggtaggctcatgctcccaaagtgcatacatacgtattaccgccttatctgtatactctatccccagtatcctgcataaatcagctacctgtatactctctcccggcgcatattttatatcaggatactcttctcctaaaatccagcctatacacatatgctggcttggcaatgtcaccgtatcactatacttcacagtggcagatacaccggtatcatattctatggtatactcgttttcctgccatactgcgtatatatttttcgacggtctgtttgactcaatccagctgtttgccacaccacacaataacggatatacggcagtcgtatcatacgaattatttccccagccacacatatgatacccggccatctgccagcccacagccggaaaagcctgattgatgcctccatatgtgtagctctttgaggtcttttctgaatcagacgcactcttattccgccagaatgtcacagcaatagtacctgcctttgcgtatgccgtataagtaccacccgaattcacataaaaaccatatgatgatgagctcattgacgaatcattgttccaattcgtgaaatcatatccggcagaactgcttgcactgattgtcacatatgtaccatagcagtatgtacctccccctgatacacagcttatgcctgtggactttctgacatcaattgtatgaaacagtcctctcaccgtcttgccataatacgaatacagtgctgagagtgcgctgtccgtccagtttgccgctttggatatacctgcatatgtagtataaacctttccccaggagggaccattatcattcatgccacccttgttcttgccatttactcgaagcaccatgcaggcatcgaggatgatggtgcaggtgccggagctaagggcattgagggcctgcgtattaaatcgggttttcatattctttaaagtaatcacataaagcatatactccttgcctgattgctttttgctgtttaagagtgtcagatattgtccgccaagctggaaataaattttctgtatctcatttccacctgtccctttaattgtcattttgtatccaattgtcctatacttggttcctgacgtagatgtatttcctgctgaacaaaaataaatattgccattcattttatttgtagccttaaaaacagcagcattaccataattagaatagtacttcacagcatcatcccattcatcagccttcactatattgcaatcaaatgagaacatataagtaataataactgtagccataaacatcatgcaaacgcatttcctaaagaacacccgcttcccaataataacatttgagatatccattttcatcatattctccctttgtatacaaaccaacaaaattataagctccgttcatatcggccaaatttaaactataatccgtaacttctgctcttgaaggaaacagacatagcaaattacttgtcacgccagccgttatcatcggaagctgccactcctgtgctattttttcaataaacatatctccgattgcatcatctgacaaacctccatttgtccactgctgtatcactgaatcaacatacgccttctgctccccactcatgccatttccagccttactgccataaaatatccatcccggtgcaacatactcattttttggtgcttccggctgcgcaggctcactttgagccggctcaggtgcgactgtctgatttgatgctgccggttttgaatcgttacctgcaggttgttgtgtgttattgctgtctgtcgatgtctttttgccgcctgtcgatgtctttttatctgctgctgttttgtcttctgataatttgtcagaagatttatctgacgctgtatttgcattatctgaattaccggctgccggtacggaattatcatttgtatctgattgcgtaccgttattttgcttattatctttatcaactacatttgtttccttcaatgcatcctttttcacaagctcaagtgtctcgctttctgctacaatatcctgtgtattttcagtcacactgacagaccgggaatcctttttcttccccttttctcctgattttgagcttactgccactgctatacatatgataagaattattgctattatcaccgccggtataataaataaaagtctgtgttgtttttcatttttcattttatatatctgctacctttctattaattggaatacttatcctcacatgatcccttgtgccgtttttgcaggttatcctgacatgcatatcatacacaccataatacggaaagctaagtgacgagccatcggctgatatgctgcctgtacagtcatttctgcccgaatcatacagggcataaacttcaagcttatccagattatcctcatgcgctgtaacatcaagcaggtcatatacactgtagcttacggcattctgacgcattttctcctttagctcaatacccggaaccggtatatttttcatgctgtcatagctgtcgtttgcgctatcgctgctcaatatatcctgtggcgcaaatgccacactcattttgttcttcagagccccaaatcccgacagcagcgcaattcccacaaccaccgccactatcatggctccatatgtctgcattatctccttcatctatagtctcccgattatttaaattgcactgttaccccatatatttataagctgcgcaagcatgcctccctgagccagcacaatatttcccatcaacacgagaaatgcacttgtggcggccgctgcaatcagcacgcctccatactgtctgaatacttctttcattttctcttacctttacatactttttaatcaattcagttactatcacagcagagtagacacatacacgagcacaccgattactccactgcctaaaagaagcataataacgcttcctcccaattcttctattaaaagctccatctgttttcctcctcttatacagccatatccacaagaaaagtactacaacgcatatccgctcagcacatgctcctgctctattccgaaaaatgctaccgcgtaagtgaacttaagctccactcttgccttttctatctcatctgacgaagcgatttgtgatgcgtctgtgactgtccttacggaattgtctgtcatatacagtttaagctccagtgtatctccggcttttgatgcattttcaaagcaggtctgcgcaaccgagctgtcataatcactgtcctcaagctcattgataatctgcgcatgtaggttctgtgcctcaacgacagtcataaatcccgacagcacacctgatgatgtaaccaccataaacataatcaaaaacacccctaaaaaggtcttcattatctgactcacaacacaccccctacactaccttgtatgataaaaagcttataaggaaaatagccatatcaactatcatcttaaatgatgctgtgataacaggagccaaaaacaaaagatacatgccggcggtcttatccttaagcctcgcggtgtctgctgcatcaagcatctccagattcttcgtaatcagctcatcaatctgacttccgcaattgccactatttccaatcgaaacagcatacagcatgcccatggctgcgtttatctccggcaggttcaaacagtcaagaaatctgtgatacgggtcagagctctccggctccacgtccagtctctccacaagcgtatttacctcctccttaagtatcaccggtatatgctctctcgacttctgtatggctacctgcacattttcactctgaatcaatagggcgaggtccatcagccacttgggaaatgcactctttacatccgctatcagatttttcttcataagcctgtgacctatacggtgctgattcagacatataagagctgctcccatagctgccacagccgcccattgtctgtcagtatacagtaaaaatacactggctaacgccggtataacagccataagaattgacgcacgaagctcctttgccggattgtatgccttgtattcctcaagctttttggcatgcttatcatcctccggcagcagatcaattccaagataatccacttcaagaaatttctgcccccagagtatgattaaatcatcaagcattataagaactgcagacagtatctgcacaatgatattactgctgatatccatgctcaaaaccggcagataaagtatgattccactaatgataacagaggtcacaactgacaggataatctgatgaaacatcctctgtctgtcctctatattgcgcagtatcctgcgctcccatgcactcttgtccttaagcagtatcctggctgattctttaatatcaccgccatagtactcagcgtgtgccataaactcgtgtgcatttactattcggttgcacttgtactcatcttcaataatcctcatagcatccacaaacacctctgtctcatcaaacgtgagcatcatatgatcaatagccctgctcacagtctccttcatatgaccatctgccagtgtgctttttacatcctcaaatgcacggataatcttctgctccttcaaaaatgaatacagcagggtgtcaatatacagcgatacatccagaaagcgctttcgcgcttcctgaaatctttggcctttgattcggtgaaaatgctgcataacaagaagaaaaacaagtaccacagccgtacacacccagtttagcttgagcagaagatgcagcacatatgtcagaaataaaatcaatatatacgtcattcctaagcctccctctcctcactcatcatggcatcattcatccgtatctcattgacaaaggactcgccaaacggctcattcacaccctctcttttaaatcttcgaagtatgacctttggtatatcgtgagtcactatctgtccgtctgatacaagcataaacacatgattggtatagttttccctgtagaaaaagcacacctggtctatgtatctgtacaccactccgtcttcatttcttctcttgcggattaaaattcccacatcaagtgcctgatatatgtcattctccatacgctctgcatccacacggctctctagcatattgagtattctgtccggtatattgcgcacatcatccgtgtggagtgtcgtcatgccacgcacaccggtgctccagctctgcagcagatattttacctcctttgagcgtgcctctgagagcataatccactttggattcattctaagacatgacttgatagcctcagagtagccaaacacatcctcactcaccttcatctctatacagtccttgcccggatttgtctcggcataacgtatctcaagagtatcctcaattgtaatcacgcgctcattcgccggtataaactgtgagaaaaacttcacgcactccgtctttccgatgcccggcatcccgcaaaaggtgatattcatcttggtctttacgcagtttatcagtacagctaaaagctcctccgagcagaatttctcagcaattgcagattctgctgtcagtctgataagcggcggtgtctttcgtatgctgatgctcctgccagacttcgcaaccgattcatgcagtatcgtcacacgaagctcgctcgtctcggcctcaagctccggatttctcttattgaactgtctgcttacaacattggcgatgcgctgtgtaaactgctccacaaaagcaggtgtcatatactgtgtgacaaactgctgattggccctgaaacgctcattgaatatatttgtaagccatatttctttgccgttataatctatatccgttatctcgttgctggctacaaagctccaaagcggtccaaaatattcttttccaagctccatgtaccacctcttatttgacactcatattggcatgatttgaaaagtttgtaatcagatcactaaatgtctttcctactatgcctgttgcatcagagcctataaccgctgttacaacgaggatgattgataaaattgctacaactgttatgagtattccgccatattcctgaaaaatttccttcataatatttaaatcctttcttcatctaagtctaaaataatagtgttaaataataaaaaaatagtgttaaataaaatcaaaaatcaaatatatgaaactgaaaatcaatggaaaaaaatagtggccgaaatgccacaaaaagaaacctgcatagaacatatgcaagacataatttaaaaagatatttatatcttacacaaaaatcgggatttgtaaataccaaatcccgaaaaaatgtgcacaaatattcatttagtttttatacatatatcacatacttattttagataaatatgccaattataagtctccccgttaggacataacagagaattgcatatctatccgttaagacataacagtgattttatgcctcgagcagcttatttacgctgacaagacgtgtgacaacaacaaacacctctgcagcctttttcagctcatcaagtgatggatatgtcggagcaattcttatcacgctgtcatccggatccttcttgtaagggaaaggagagcctgcacctgtcattgtgacaccagcttccttgcactttgcaacgatttcctttgcacagcctgaaagagcctcaaatccgaagaagtatccaccgagcggcttaacccatgttccgatgcctcttgaagcaatttcatctgtgaggatattctcaaccagctcgaatttaggtctgataagagctgcatgctttgccatatgagccttgataccatctacatccttaaagaatctcgcatgacgaagctgattaatcttgtcgtgtccgattgtctgtatagtaaggcgcttcttgatatcctcacggtttttctcagatgtgcatataccagccacgcctgcaccagggaatgtcaccttacttgttgagcaaaactcaaataccatatcagggtttccctctttctcgcaaagctcaaggatatttggaatctctgcctgtttatcatcatagagatgatgaactgtgtatgcattgtcccagaagattctaaaatcatctgctacaggcttaagctttgcaaagcgctcaactgtctcatcagagtatacaacaccctgtgggttagagtattttggaacacaccagattccctttacagaggcatcgttattgacatatttctcaaccatatccatgtcaggaccatcctcagtcataggaatgtttatcatctcaactccaaactcctctgtgattgcaaagtgcctgtcatagcccggtacaggacagaggaacttcaccttgtcaagcttgcaccatggtgtattgccgcaaagaccaaagataaatgcacgtgaaacctgatcatacatgatattgagacttgagtttccatatactatagcctgctcaggctttgctcctaccatgcctgcgataagggcctttgcctcaggaattccgtccagacatgcatagtttctcacatcaagtcctgattcacttttcatatcactgtctgatttcaagacatcgagcatagggagtgagaggtcaagctggtctgctcccggctttccacgcgacatgtcaaggcttaagccaagattcttaatcttctcgtactcagcctcaagtgctgtcttttcctgcattaactcgtcctttgtcatttctgtatactttttcatttaaagatcctcctggtctgattttctaaatatttatgttattatcaactatttgcaattattcaagcttcatctatgcactttcatgtatcacagtctctgtgaagctcatccatgtgtgcttttatctttgcctcatagcctatatccgtaggcttgtaaaacactctgtctgtaaggccatccggcagatactgctgcttcacatagtgatttggatagtcgtgtgcgtatttgtacccgactccgtgcccgagcttttctgccgcaccgtaatgggcatcctgcagatgtgccggaacagccggtgtcttagtctgcttcacgcagctcattgctgccgatatcgcattatatgatgcattgctctttggcgcgcatgccatgtatgtaacagcctgtgacagaataatctgtgcctccggcattccaacgcgctcgacctctgccgccgccgatgccgctacaaccatagccatcgggtctgcattgcctatatcctccgatgcaagtatcatgattcgtcttgcgataaatttcacatcttctccggcataaagcatcctcgccagataataaaccgccgcatccgggtctgagccgcgcatgctctttataaaagcagagatggtatcgtaatggttatcccccttcttatcataggagataactcttttttgtatacattcgctcgccacatcgatagtgatatgaatgatgccatcgtctgacctgtccgtggtcagtacaccaagctcaatcgctgtgagcgccgctctcgcatctccgtttgacacatctgcaaggaaatcaagtgcatcatcatctatctgtgcattgtatgcacccatgcccttttctgtgtcagtcagtgctctcttaagaagtacctttatatcatccgttgacagctttttaagctcaaaaatgactgagcgtgaaagcaaggctccgtttacctcaaagtaaggattctcagtggtagctcctatcagaataatggtgccatcctccacaaacggaagcagataatcctgctgccccttgttgaagcgatgtatctcgtcgataaaaagtatcgtcttcttctgatacattccctgattattcttcgcctgctccacgacctcttccatgtccttcttgcctgcagaggttgcattaatctgcataaactcagcactggtagtgtgggctatgacctttgccaaagtagtctttccggtgcccggcggcccgtaaaagatgatggagctgagcttatcggctttaatcgcacgatacaaaagcttgtccttcccaactatgtgctgctgcccgaccacctcatcaagtgttgtcggacgcatccttgaagctaagggaccgcttgtctccttattctgttctctcatgtaatcaaataaatccatatcatccccgcctgaaatgcatatttgatatatctgttatatcattttgcaatttcttttagcaaaaaattcattttgcattgatataatcggcaattacgtgttttataagtgctaattatgcataaaaaagtggtgcaaaattcatttccctataataagatacatgaatttgcaccactttacaacaccaaatttatttttctacgaaatgactaatatttgccctttaatgcaggataaaactgcttaaattttgcataacccttctcatatttttcgacaagctgtggacttggcatagttgtatccttctttctcacaatagccgctgccgcagcctccacattttcaaagcagccgtttgcaactgcagccagtattgcaccaccgtatgccggtccttcctcgacctctaccgtgtcaacctgcatattcatgacgtttgcaactatctttctccaaagcacactctttgcaccgccaccacagattgttgtgctttttggtgccacaccaaggctctttgccacctcaagtgaatctcgaagaccatatgccacaccctcaaacacagcctgcagcatgtcggctctgtcagtatccatgctcatcccgataaacgctgcccttgcagacggatcattgtgcggagagcgctctcccatcagataaggcagaaaatacacatgattctcaccaagtctgccatcctcctcaagaggcttctgctcattcacaaagtcatcggaatgaaggatatccttcatccaccagttgttgcagcttgcagccgagagcatgcagcccatcagatgatagccgccgtcagcatgatcaaacgaatgaagcgcattgtgcgaatccactctgaactcatcacttgtaataaaaagtgtgccgcttgttccaagagagaggttgcactttccggctccgactgtacctgtacctatagctgcagccgcattatctcctgccccggctgcaactatgcagtctttaggaaagccaagctcacatgccacatcagctttcagagtgcctgtcttttcactgctctcataaagcccaggaagccactcctctcttacatcgcatatgtcaagcatctcctttgaccagcacttatttttgacatccagaagaagcattcccgatgcatcagaataatcggtactaaatacacctgtcatgcggtatgcaatataatcctttggcagcataagcttttttattctggcaaagttttccggttcatttgcttttagccataaaatctttggcgctgtaaatccggcaaacgctatatttccggtgagctcagacagcttttcttttcctattacattatttaaatagtctgtctccttctgtgttcttccgtcattccaaagtatagcaggtcttattacattgtcgttttcatccaatacgacaagtccatgcatctgaccgccgaagctgattcccgcaacagcgctcctgtcaaaatctttagtcagctctataagtccagccacggtctgctcccaccagtcacatggattctgctctgaccagcccggctttggaaagctgattggatactcctttgagactatatttaatacctttccgctctcatccatgagcagaagctttactgcacttgtgcctaaatccacacctatatatagcatatctattctccattcacgtaatatgtttacatcagataacgtaactattcagaacccactaacagaaaggattttctgtcttgtatggcagtgatgccggctggttgtagttaatatcctcaactggcacgccaatatatttaaatacctcaaaaagggcttttccgtaatgaccgaaagctacagctccgtgatgaggataattcttctcaataagcacatgacggtagaaacgtcccatctcctttatcgcaaacactccgatactgccgaatgagcgtgttgcaacaggaagcacctcaccctgagccacataagcgcgaatcttacagtctgctgtagactgaagacggtaaaatgtaatatctcccggcactatatctccctcgagagttccgtttgtcacctctataggaaggcttcttgccataatcatctgatacttcatctgtgggttgcaaaccttgcttgaacaggtgtttccacaatggaagcccataaatgtatctgtatgcttgtagtcaaatctgccctcgattgactccttgtacatatccttcggcactgagttgttgatgtcgagaagtgttactgcatcctcgctgacgcaggttccgataaactcactgagcactccatagatgtcaacctcgcatgaaaccgggatacctcttcctgtaagacggctgtttacatagcatggtacaaatccaaactgtgtctggaaggcaggccagcattttcctgcgattgccacatactttctgtagcccttatgctcatcaacccagtctaaaagtgtgagctcatactgtgcaagcttctcaagaatctcaggctttttgttgccctcgccaagctccctttccatatcctttaccacatccggtattctctcatcaccggcatgcttgttaaatgcctcaaacaaatcaagctctgaattttcctcaatctcaacacccacgttatagagctgcttgattggcgcattgcatgcaaggaaattgagtggtcttggtccgaatgaaataatcttaagattattaagtccgtatatagcccttgctattggcaggaattcatgtatcatatctgcgcagtcatctgcatcgcccacaggatactccggaatatatgctcctatatttctgagtgccagattgtagcttgcgtttaacataccacagtatgcatctccacgtccctgaattaagttctcctgtgtctcctctgctgctgcaacaaacatctttggtccgtcaaagtgctttgcaagaagagtctctgaaatctccggtccaaagtttccaaggtaaacacaaagtgcattgcagcctgctgcctttatgtcctcaagtgcctgtaccatatgtatttcgctctccacgatacatacaggacactcgtatatgtctgctgcatcatattttgcagcgtatgcatcgacaagtgcttttcttctgtttactgacagactttccggaaaacagtcacggcttaccgcaactataccgattttcatttttggaatattgttcatagtgtaaatctccttctctcatatgccccatcggacagattaattgttcttatgtgctaagtatatatccggtccagcttaattgatacctataatttagtaaatttagtgtatttttcaacttaatttactaaattataatgttaatactatattgtcatgttataataaggcaaataaaacataaggagctatgccatgtctatcacagcaaaagaacttgccaaacaacttaatctttctgaagcagctatatcgatggcacttaataataagcccggtgtcagcacactcaccagaaaacgtgtgctcgaagctgcggcctctgccggatatgatttttcaagaatatcaaataccaatgaagctccggcctccaatggcacattatattttgtaatatacagaaagaatggcgctgtagttcctaattctcctgtttacacacatacagagcacggcgttttggtacaggatgttccattcttttcacagctgtcagagggtattgatttgggctgcaggcactgccactactacctgaatatcagctacatatacgaaaatgacgatattgaggctttgctatctgagtggaaaaggcttggagcaaagggtatcctgctgcttggaaccgagatggaagagcatgacataaagccctttacaaggtgcggtctgcctgttgtgctaatagacaactatttcgaagccttaaacctcgattgcgtgactataaataaccttcagggtgcctatcttgccacagactatctgatcaagcaaacacatgcacagcccggatatctgcattccgcatacagtataaccggctttgaggaaagagccgacggcttctataaagcaatacgcaaaaacggtatgtcaacctcgcgctcagtcgtacatcacctctccccttcagttgacggtgcttactgcgatatgaaggcagttataaaaagcggtgatgaacttgtccgatgctactttgccgacaatgacctgattgctgccggagctatgcgtgcactttcagaggcaggctaccgtatccctgaagacatatcagtaataggctttgatgatatgccaatgtgtacctacattacaccgcctctttcgactgtgcatgtgccgaagcagtacatgggtgaaattgcagtaaaaaggcttgcagagataataaattctacctctgcaagccatgtaaaaattgaaataagtacagaaattgtaaagagaaagagctgttaaagactcttctgcattctgccagtctacaaagcaaacgtggtcatattaatttttataaaaatcagctataccatatcaggtatagctgattttgagtgtttttataatccccgaacatttttaccattcttctaaaaaattctccataaactgtgttggagacataattttcggcttctcgacatctatatctgaaaaatctttatctcctgtcacaagaatatcaacatcctcaataatagccgtataaagtactggataatctttgatatctctgatattaaatagtccactttccatactaccaggtgtgtaaacatactcaaagctcatcatcataagtaatttgttgattatcatttcttttccgggaaactttctcctgactacattttttaactcatctacaacgtaagatgacaacacaagctgatggttagtaaatatatagttcatcattgcatccatcttagtccccggaaaaagtaatgccgatatcaatacattggtatcaagcataattctcatctacttcaccacactttcctgcctaagagattttatcatttccattacatcatcatcgtctttaagtccgagtctttctgcctctcctgcaaatgatctctgtgcttcacgaagtgcatccatagatgaattcatcatatacactcttccagactcttccacaaacaatatcttatcgccattcttaattccaagtttttttctaatttcaataggtattgttatctgcccttttgatgttacctttgctaattccatacaaaaacctccttcccaagtaatgaattccttacttttcttacaatataattatatccatttttcataagtttatcaaccacaatccaccgataaaaacttggttgttctttctctcaagtgcaatctttttatcatagtctgtagttccccaattagttgctttatatccataaaatctcaccttcttctcccttactgttttatttactaaaacaatagaataatctatagtcccttgtaatatctcatcatcaattgtgccatcagctttcttctatcagccaagaaatcatcatagttctctacagtcattgatacaatgctttctggaattgcattctcactaagattcttcataagagcatctctttcaaatatatttccaaatgcaatgttcttcttgtcacactgttccaatgcactttgaaaatatatattcggggcatcatcacttatagctttattcacttgagtatcaagatacgtaaaatttgcaacctgattatacctcccctttgtatcaatgccattatttttcaaatatgccttaggaaatatatgatgtacatctcctgatatattaattaaatctgaaatcattgttccatgcataaataatgaattgcaattaagattaatctgtgctgcaagaaacgtattaaatgccgggctattagttgacgttgtctctagattctgtggcaaagatatatcccaaaatgtatctgaaagaaccgatgcttcaatctcataaaagaagttaataaaacctttttcatttattaatctaatatccctgctcattacagactcaggcgatccaacatatcttcctgtaagtgttgaaagaacaaaccatttttgcacatgatgctttacttgatcatgtggtattgaagaatcttttgatagtttaagatataacatatatgcaaaatcaagtgtcatctgagaattgagctgcttactagatttaaatccagcacctttaatagccaatacaaattgttcaaaattatgttcattgataaatactttgataccttcacaaagtttattatatgaatcttctacaatttcttccttaaactcacgtgtttcaaaatctctacctgaaagcaagctaactaaatcggagagctttgcacgattaaaactatacatgaaagcgacacgaagcatatcattataatcaggattataaatatcctcattatctttagctagccatttaattttagatgcaaattctgttttttcaaattctaaatctttaatcatttgagggtaaaaatccggttttacagctaaatggcaaaaataatcaacaaccttacgcagtatatttcctccatgaaccgtatctgcagccattttggacataacaaaatcagactggcttaatgcagttcccttagaattaatacgaataaatatttccgttacttcgtcaatatcaagagaatgatcaagctctataactccaatctgcctatttgcaattcctctcagcttcataattgcattatttacttcattgggtttcacacccaaattattattacaatacttagggacaaactcaaatggatcaaaatcatttttaaatacttccgaaatatctggaatccattttttatcctttaaatgagatgcatcttgtactgcaaatctcttatctgaatcggttgcaagcgggttaaatgcgattttaaccctatccttattaaaatcttcatctaacacttcaagacctgctattgatgccatcaatgctgtaattctctgttgtccatcaattaatacatgctttccatttgctactgttccatcctttgtcttaacatccggattcttccatgtaataatataccctgtagggtatccattatacaaagaatcaatcaaatcccttacctgagctcttttccatacaaatggtctctgaatctcaggaataacaaattgccctgcttcaataaagcccaatattgcattaacattatattgcattaatgtaaacttttctccttgcataatcttatcacctcaaacatttgattattaaaattttcgacttattttctagttgcttacattaattatatattttttcaaataataacacaattaaaaagagagggatttttttctcctttgtcagaggtctgtcctccatgccaaagcacaaaataaaacaggcgcggagaaaattcctgcgcctgttttacaaatatatcttcatttttatgcattttgctgcactgcggatgcactaagctgtccatccttcacatctatgaggatggtatctcctgctctcacaccatctgccagaatcagctttgctgcgagtgtctcgacatgcttctgcagatatctcttgagtggtcttgctccgtataccggatcgtagccattatcggtgataaactgctttgcagtgtctgtcagctcgactgtgatttccttgtctacaagacgcttgtttaagtctgccatgagcagggtgatgatatgaccgatgttgtcctttgtgagaggcttgaacatgatgatctcatcaagtctgtttaaaaactccggtctgaaatgacccttaagctcatccatgacgcggttctcacactctgtgctgatgctgccgtctgcctctatgccctcaagaagctcctgtgagccgaggttgcttgtcataatgatgattgtgtttttgaaatccacagtacgtccctgtgagtcagtaattcgtccgtcgtcaagcacctgaagcagcacgttgaatacatccggatgggctttttccacctcatcaaagagtactactgagtatggcttacgccttacagcctctgtgagctgtccaccctcgtcatagcctacgtatcccggaggcgctccgatgagtcgtgacactgaatacttctccatgtactcactcatatcgagtctgaccatgttgttttcatcatcaaacagacttgccgcaagtgcctttgcaagctctgtcttacctacacctgtaggtccgaggaacataaacgaacctatcggctttgtaggatccttgatgcccgcctttgatcggatgatagcctctgtcacctttgtaactccgtcatcctgtcctatgactctcttgtgcagctcctcatcgaggtgaagtgtcttattacgctcactctccgtaagctttgcaacaggtattcctgtccagcgcgagataatgagtgcaatttcctcatcgcccacattctcacgtacaagcgataaatccctgtccttaagcagtgcttcctctgattccagctccttctgcaaatttggaagcacgccgtactgcagctctgctgccttttccaggtcatagttctgctgtgctgtcttgatttcattctttgtggactcaatcttttcacgaagcttgctgaccttgtcaacagcgcccttctcgttctgccactgagccttttttgcattaaagtcatcacgcaactctgcaagctccttctggagtgctgcgagcctgtcctgacttaagtggtctgtctctttctttagagctgtctcctctatctcaagctgcataatcttacgattctgctcatcaagctctgccggcattgaatcaagctccgtctttatcatggcgcatgcctcatccacaaggtctattgccttatcaggcaaaaatctgtctgtgatgtatctgtttgaaagcactgccgctgtgacaagtgccgaatctgtgattttaacgccgtggaatacctcgtatctgtccttaaggccacgaagtattgagatagtgtcctctactgtcggttcgtctaccataacaggctggaaacgtctctcaagggctgcatccttctcaatgtactcacggtactcatcgagtgtggtggcgcccacgcagtgcagctcacctcttgcaagcattggcttaagaagctgtcctgcatccatggctccgtctgtctttccggctcctactattgtgtgaagctcatcgataaagagaattatctgtccgtcagaagcttttacctcctcaagcactgccttaagtctctcctcaaactcgcccctgtacttagctcctgcaatcagagagcccatatcgagtgcaaacagttttttgtcctttaagccctcaggcacatcgccttttacgatacgctgcgccagtccctcaacgactgccgttttaccaacacccggctcaccgataagtaccgggttatttttagtcttacgcgagaggatacgcactacatttcgtatctcatcatcacggccgataacaggatcaagcttctgctgtcttgcacgctccaccatgtcgtagccgtatttctcaagtgtatcataggtggcctcagggttatcggatgtgaccttctgattgccccttaccgtagaaagtgctgtgaggaatctgtctcttgtgagaccatactcctttatcagctccttcattgccttgtttggatacttcagcagacacaggaaaagatgctctaccgaaacatactcatctcccattgcctttgcctcgtcctcagcatggataagaaccttgttcagatcattgcccacatagacctgtgcactgctgccgcttacctttgtgcgcgctgccagatgacgctttgcattctctgtgaaatgctctacgtttatctccatcttgtcaatcagcttcggtatcagtccgtcctcctgtgaaagtaatgccacaagcaggtgctcctgttctatctcctgattgccataatcatatgcaagcttctcgcagtcattgactgcctctattgatttctgtgtaaatttttgaatgttcatagtctcactcccttctactatgttatccataaatataatgatatgttggtcactaaggtatgcatcgatgataccttttgcccctttaatcatataatccttatgtgtcatacaggtaatatcaaaattttatctctaaataatcctttaaataattcttcaatattccttgtgactatgttataacacgcaaattagcactcgtcaagtgagagtgctaacaatttttattaaataaatataaactttttatttacaagcaaaaaagagtgatttacatcactctcttttactcaatcggttgcacaatccccgaaacatttgccagattctgcatcttatcatcagcgtctgccatgatatctgcgcatttcttgagctcctgctgcatctcctccgtgaatatacggctcttcttgtagcggagctgatgctctgtgctggcccagaaattcatggcaatggtacgaaactgtatctctatcggcaccttgtccttgtgatccgaaaaatacacatcaaccagcactatcatatgaagactcctgtagccattctccttcggtttttttatgtagtcctttattgtgacaatctcgacatccgcctgattcacaagcatattggccacctgatatacatcggatatgaatggacaaatgaccctgacgccggctatatccttaatctcacgcttcatggcgttggtggtgagcggaatgccctttcgcttcattttgtctattatgctgtcaagcgactttacacggctctttatgttctcgattggatttctttcgtgattgtttttgaattcattatttaatatctgcagctttgctactatctgctgtatacccgattcgtagtagaacatgatgtgttcatactgcgaggcaattgaactgaattcgcccaacatcggcagcatctctatttgtgtatcatccatgtttatactccttggttttaggttttcttactaattgtataccttatactgtttatacatattatgcttctgtattcgattttccttttttaactgcctttttaactatcagctttgaaacccggtatgtcacttccaccagcgcaactcctgcaactacatcatatatcacatgctgcttcgtagtcaatgtggatatgaatactgctatagcgcaaatacaaaaggttgtacgtatccactgcggtacttttttattgccacgaatgccaatatagcacagccagcttactaggcagtgtatagatggaaaaagattgtccgctgcatccatactatataaaaagcgcatgagctgtgcccatatgtctgagcccactatttccgggcgggtgttggttgtaggatacacgacataacagataaaacagactgcctttgccagccagtctgccatgaggaaacgataacagtgccttttatccatcgctgcattgtacagatatcctataatccaaaaaatatagcagccaaaataaatgactactgtagggtacacaaccggtatcatatcatcaagcgaggtctctatattgtgatggataaaaccgcctgcaatagcacgcgcaccccagtatacactgaaattgagcactactgtaaaaagcagcggaatacgactgtattttggaagtattctgttaaaaaactgtcctgtttgcgatatgctgtccctggataacacgtacttctttgtctccttttatacactctttaatttccggaagcaggtcaatatgaccttttttaaacaaaagcactattgtggaaccaatcagctcaaagtgccccatctctgcgccctttctcatcatgacattctcgtggtcattgactatgcctcccacaagcagcgcacctatctcaatctgtgccaccttgccaaaattaactgtatccagaatagtccacatacgcctgttttgcctgtatacaggagcattttccagtgcaataggctgtacactgtgaagcagtcccttcacaaaatgattcctgccctgaaatccatcatctatatagcagtaatgatgataatcgttggcacaaagacgcagtatcacgcagtctcctccaacaaattcctttgcaatttttttgtcggtgacaaggtccgtcaccttgtaccatgagcccttgatgtgaaagctgttgttgctttttatcctgtatgcactcaggtagccgtcacacggactgataagatgctcagcctgcctgtccacctcaatatcatcacgctttctggagaaaaagtcctgaaagctgttatatttctgacccttaaaatcagacatgtctatattgttattctttatataccggctgataaacggcttagacagcggggagcgtgctactatttctccgagcttaagtgcacctgtatgcagaagcaccttaagtgtcacacgcccaggtgccgtggtgtaaagccagtctacaaacgatttttttgccattaaataagaacctccgcaatgagaatacaaaactcaactgctcctatacctacaagcagaacctctccaaaaagagatggctttttgagctttacagggagcacgtagcaaatgccaatgattaaaagggcaagtgccgcgattgtctgtgtatgtatagctgtgaactctccaatcagatataccgccggaatagcaagcgcacttgatgtgattggaagccccagataatactgtctgcgctctgctgtcgctgcctgcctgttggcctcatccacattaaagtatgccagacggataagcccgcaaagtatgaatacaaatatggcgataaatgcaactgatatctttggtgtcacacaaaatacccacactgccggaagcacaccgaagcatatgatatcacttaacgaatctatctgtatgccaaatgttcgctcgtccctggtacggtccttctttgtggatgcaatggtgccgtcaaacatatcacagacaccggctagcataaggcagattagtgaacccacatacctatcctttatggcaagcataactccaaggaagcctatccacatgcctatgtatgtaagcactaccgtgtaattataaaagcctatgagccctgtctttttctctgtgtctgtattccctatatccagagtatctgctattgcagaattaatattcatattattcatattgattcccttactttcattcttttgtttttatcagataaaacatgataagttttctcatttacccttaaccggtaatattatatgcccttacctgatatataataacatattcatgacataaactcattaattatttgtttaaacttttcttaatatctcttatttttagcaaaaaacaaggcagaacccgctttctgattctgcccacatactatagcatatcatgaattatatctttaatctcctgcttgtccttttcaagaacaaatgcaagctctgcatttaaattgtgctctgccatcttgccatagcgctcatcgacggctgtagacttcttgcctgcctgtgcacgctgctcatttctgatatgtaaacactttaagagactgatcacactatccggctcacagcttctgactgcctccttatagcgcgtttcgcgctccttctcattgtttaccgcgagcgcctctatctcaggtactctatcgagcaccgccagtgcctcatcctgtgttattaccttacgtatcctcttatcagcattgtcaacaggtatatacactctgtcattctcctcctcaacagggcggagtaaaaaatatgacttgagctgcttgtctcctgacatgtctaactccacgacttcgcttattttgcaaattccatttgtagcatttaatacgtaatcacctatttcgaacatatcacacctctttcgttatacaatattattttatcactttttcacgaattttgtaagaggattttttcaaaaatgtcaaatatataaaaaaagcgtgttttacgtcaataaaacacgctttaaaaaattactcaatcagctgcttcacgcggtcatcgagctggagcatacggatgataagctctattgagcccttaatgccgtagctggcactgttgatacagatatcatagttacttgccttgctccactttctgccggtatagaatttgtaggtcttcagatgtctcttatcctcagattctatccatttctttgcctggttcggagtcacattcttatttatctcaaggaaacgctggattcttctcttctccggtgctgtgataaaaatacttatgtgaggaatatgattgtttgtcagaattgcatctgcaaaacgtcccataacaatgaagtcctcctgctttgccttctctacaaggaacttgcttgtatcaaagaaaagcacatcctctgatgaaagtccgtggtatttcttaaaagcttttatgcgctttttgattcccattcgctcttttttctggaaggtagctgtagcctgggctgcttcctctccatccttctgtctgaacacctcattcatgacagacacatcatagaaattcatacgaagcttgtctgcaagtgcaaatccaatctcatttccaccacatccgcaggaacgtcctatacagataatcagatgatcgcccgtcttgaaacgatccttcaggtttacggtatttaaatccgctatctttggatcgaggatatctccgtcggcaaagcctgtcgggagctccgctatctcctctactatgttgttgtatctgaccatgatatcatgccttgtatcgtgatcaggtattgttcttgccatgttgcttatcagggcaagctcgcttcggattcttgagctgttctgccttgagtgcagatcctccatgatgttacggatacatatatccttctcgccaccaaataccctgccgagggatgagcctaatttcttgtatacttcggcatcaagctcatagatttcgatggcaagagctttaattttctcgtcataaaattccataattcatccctcctataaaaagaatatgatcatatctatgatgaaaacaggtatcagataacgcaatgaccaccatatgtaaccaaagaacgatggcatgttgataccgttttcgtctgataatgacttgaccataaagttcggtgcatttccaatatatgtgttggctcccataaatacagcgccacacgaaattgccataagcatcttgaccggcaccactcccagtgtggttgcgacacctgtagtaaagtgcatggctcccgctgtagtaaggaaaaccagatatgtcggtgtattgtcgaggaagcttgaaagtgctcctgttgcccagaacatctcaaacggctttgtgattccaagacctgaacctgcactctttaataccataagagcaggctgcatggtgatgaagattccgatgaaaagcaccgcaacctcctgaattgctccccatgtgaaatggttctgcacacgaacctccttcggtgttgtcttgaaggaaagcagggctgcaagcagaataatagcaatctcaataattgcaggcacagtgagtgtaacctccctgaatatcggaataccgataacctctcctgcagcgttctggaatgcagaaagcttaggaagcacaccgcttagtataacagctataacaatcattacgatatataaaaagttgtgggctccctttatcctgataagaggctcattttccttcacctcaggcataagtcccttagtgatatccttctggtatgccttcttgtccaaatgataaaatatggtaagaagcagtatcatatttaatacgagaaccggaaacagcctcatgctccagaagaacgatactcctcttgaaaatcccatgagcagcggcggatctccgataggtgtaagacatcctccgatatttgacacaagaaaaatgaaaaataccatgatgtgacgcttgttctttctccatgagttcatctgtataatcggccttacaaaaagcatactggctcctgtagttcctatacagcttgaaaaaaaagttccaacagcaagcatgataacgtttacctttgggttgccgaccagacttccctccagcttgatatttccggctacgcagaacagtccaaagagcagcacgataaaggtcagatagtcgcctatcagacactccagtaccgtctctacggcttttggtgctccatagaacagcgcgaacggaatggcaaaaagcagtgaccataagataactgcatgagcttgatgcttctcccaccattcaggcttcacaagcggcataactgctatgcacagtaataagcccgcaaatgggatacacaacattaataatgtgtttgacattcttttcacctctactttgttaaaaaataaactaattcaaatctagttcattttacaccattattttttatttgcaaccgtttataaaaagattttaatttatatatgttttttatgtaatatttacatttttataaacaataattcattaccagttggtaaaattatctataatatagtctgcatcatgagccatatcatcctttggtgaaatattcgatttcacataaaaggcatccatccggcattcctttgcacccttgatatcggtagtcgaatcatttcctataaaaagcgattttgatacgtcaatatcatgcttatttatcagctccttataaaatctgatatcaggctttttggtattataatcagatgagataaatacgtcatcaaacaaatcaaagatatcaagtcttctcatctcataggctgtaaatatacgctgcgcatttgaaagcagatatacattctttcccgccttcttaagttccttaagcatctcctttgtgcccggataaagctttatgtattcggtgctcatcaccctgaaaaactgacctgtatgcactggaagctcctttgtcggattcacgcccttttcctcataaagcttttcaaatacatcctctatatgtatctccggtgaagcttcatgggcatatgagatggcaaactgcgcatctgcatcagacttttcaattttcttcttcagctctgcctcgctgctctttacaagtgtctcatagcgctccttaagctcctttgcctcatacagtgctccgtaatagccatagaacatggcgagcttttcccagattgcagtgtcactctcgtctgtgtgaatatccacgagcgtaccgtagaggtcaaatatatagttatcatatgtgagtggaagtttcatgcttttttcctttcgacaatccaattatattccttaccacccattgtaatatgctttgtggcttgagtgcaagtacttttcttttttcaatagtttccagtaatttcaataatacgtggcataagccggtggttggggcaggcggtactgtcgtgctggctacgcttcgctgttaagtgtctgtacgaattatgcccgcaggttttctatgcccgacgaaaccgtcgaaactcgccatccatggctcgatttctccttgcctcggcgtccatgcctcggcatttctgtgctttacagcataattctacagacactaaacagctgcgctattcgcccacccgacagtaccgcctgcccacaccaccggcttacgccacttacgctgagatataatgtgctggtcctcacctgcggttcggacggcacggcgctctcagcctgcatgtgggaagctcccatcctacgatgcttcccacttgacacactttattcgccggatggcatgcagtgtgttctgaagaaaattatgaactgccacgaggttccatattccctaataacacaaaaagccccagcatatccacaatctatcagcacatgggctcggggctgacttcataattttctgaagaatatactacatgccaccccggcatcctctcagcctgcacgtgggaagctcaaaacctacgacgcttcccactcacatcatcgccctgcgaagcttcgccaatgtattcttctccattcgtgatatggccacctggttgcgtccaagcacttctgccacctgcttctgtgtcttatcctgcatatagcggagcataatcagtctgcgctcgctatcatccagtgagttaaacgcctgctgcattgcgatgtgatttatcactttatctgtctccgatggcttgtctgatgcttctgcactcattttattgtccaaataatcaagcacactttcattttctattgacgatgcatttttatcggcttccatggcaattattatatcctgttttgacataccggaaataatttccattttttcaagtgatatttcactattttcattcattctgtatttttctctgataattgcaatttttcttgcatcatccagtatttttcgactgatatgcaccattccgtcatcacgtagaaagcgctgtatttcccctattatcaacggtactgcgtatgtagaaaaggcaaagcccttactttcatcaaatcgctgcgctgcctttgtcagcccaactgctcctatctgaaataaatcctcccggtcaactcctctgtttctaaagcgtttcataactaaataaatcaggtttatattttctgtgacaagtctgctgattttgtcactcttcatagtacttttttcatctttactgttgttccgtgtcccggttctgatgtaactgtgagcgcgtccataaatgcttccatgaatgaaaaacccatgcctgatctgtcaagctgtggtttggatgtgtataacggttccattgcttttgccacatcctgtattcctactccactatctgatatttctatgtaaagctccctgcctatatagctgcaattcatatgtacctgtggacaacttttttcttctgctgcctggtgatctgcctgaccggatggaatattgtcatcccccatctcatagccatggataattgcgtttgtcaccgcctctgacactgctgtctttacgtcctccacgtcatctagtgtggggtttaattgtgccataaacatggctgctgtcattctcgcaaatgcctcattctctgaaattgcatcaaagctaagcgatatatgatttgtttttgctgcgttcattatgctccctttctgtctgattatattttaatttaattcaattttaaagcttatgtacaatagtgtaaatgccggcacatttcaaaagcgtgtccactctgtccgacatattgcaaactgacaccgagctgtcattaaagtacttaagcttctttgttcttcctattatcactccaatgccggagctgtccataaattctgtctgtttcatgtcaaatactatttttctgacaccacagccctctataagtgcatcaagctctgcgattatctgcccggcgcagtggtgatccacctcctttggcataaggtatgtcacccggtctgcttccttgatataattttctatcatgtcacactcttcctttcctgttcatataaaaaagacaccggagattatctggtgtctttcgtaattctatatttaattattgcctcgcagcagttgttttactactgttcctgtgccagataattctttgatgttctggccttctcagtgcctgcgtagttgtctaccacatactgataatatggctttgcagatgctaagtcacctgacttcctgaacgactgcgccaggtaatatgcagctgaaccatccctgtatgcctcatccatgccgacaagcttctggaatatagggattgcactctgataatcgccactgctgtatgatgagtatgcctgactgtacagtgcttccttatatgaatctgcaattgaaccattgagcgcatcatatgtctgcctagccgagtcactcaggtagcttgtgttgatattttcaagtgcttctcctgcctttattacatcattggatgtatagtatacataggcattgagcaaagcctcatatgtggaaatctggtctgatactccatcatttttcttcttctcgtcatcaagctccttctttagcttgtctatctgatcattaagtccactgatggtctgcccatttgtggaaatcgtatcattggccgataataactgcttctttgcatctgttttcgcctgactttttatgcccggaaccacaaggaagcacgtaaccgccactccgactaccagaccgattataatatagagtatatttgcccacattgagctctccctgaatcgctttggcataatgattgtttcgtttccactctggtaggaaattaaatcatcatttttcttttttctctcagatcctttttccttaagacgcctgttcacttcttttaagtatctgagggtagtggtattgtctgtatctatcttgcctgcatcgcgtaaggctttctttgccttatccagatgtccctcctccagatataaaagagccaaaagctgatgtccctttacaagctttggatttaaggataacacctttcgaagctgtataaccgcaaggtccttactgtcctgcttgcaataagttaaagcctgattatattttttaatagtctgatttattgtttcgagctgatttctgttattatgaatctgatctatatacttctttgccagattatcatcaggctgatagtttgcactgatgacccactcacttaaggcgtcaaccatctcacccatctcatagtatatgagacctaacagattccttgcctggatattgtacttataaaacttaagactctgcctgagagatataatcgctccagacagatttctcacctgtgccttttgtaaaccatcattgtagtatgagttggatattctaatagctcttttaaaaagtgaaagatcagccccacatacagggcatttatcgttccatcctgcatcttgtccgcatttataacaaatcatcttaattcaccctgccttttgtcctgctcacgtaataactgtgcaatgatatctgtgacatctgtcagatcgtggctgtaaatcgcagattcagcctcctctatctctagacttggctcatagttctttatttcttcatcaaaatttatcataatcctgcctccataattacctgctaaataatcccatcaaaaaagggtcactatatattataataaagtaacccctttatgcaagtatatttccattaagatttaataaaaatatcgcaatttttttatttcatcgacagcatcacgactgccttgtccttctccttgaactcaatcttgtcgaattcctccttggtgacgagctttgagttgttaatacacacctcgacatttggatatacatgctccaaaacctgtactgtcgcgcctgtcgagcgctccactatgcccttaagccgctccagctcctccttatcttcggtaagctctgctgttttctcaatttttgccctgacaagcgcaagcttcttttcctcaagattcataccgtcagcggcactgcccatcatctgttctatctgctttatgcctgcattgatattgttaagcagcatctgcttttgatcaacaagcttttcaagctctgctatctttatcttaatctttttatgcacgcccacatgcacctcagtcttgataaaggcatcattacccaggttttgcacctcaatgcctgcacagccatatacttttccaccgactatgcttgcatgtccaccattgaagattaccttatcattgctgaccacattgcagttgattgcagaatcagcctccacaaagccatctacctccacatcggtatactccatgaacttggcaaacagattgccttttacaataatccgggcctttcccataccaatcatgccattccttagaatcaggtcattgccggcctcaagcacacagccctcgcaaacaccatctatcgtgatggactttgcagcccttattctggctccggtcttcacactgccatgtatgaccacgtccccgacaaaatctatatttcctgttcccacatccacatcaccgtttatttcaagaataggaagaataataattcgattcttgtgcctttcaattttgccatcgatagcagctgtatatgtaagtccatcgacagatttgtcaaagccacgccccacaagcggtggcagtcccttgcctttctttgcggcaattaccctgccaagcacatcaataccatcctcacctgcaacaggctcacaatagtttgcaatcgtctggccttttttgaccacctcaaccgagtgcacactccagtaatccactgagccatcactcttaaccgttgggcggtggttcaagtcactgtcgaagtaaaaatcaaagtatccatcagccccgtcaacagccggctttccctttgcaaaaagcacttccctgcccataagtcttttttctaccatatctgaaatggtctcgcaattgatgccgtatatcacaccattgcggtttacagcttcaagcacctcatccactgtatagtggtattcttcttcaacagtgggcagcatgataaatgcctccatcctgtcgttgcttattctgataactggctctctctttataccggtatcatccatattttttcctcactatatatcggcctttttgttcctgctaaagtataactatcctgctatttctttaataaatgcatttatgtattattctcactttcactcattatatcatcatttaaattttaagaaaagccactaaatataaaaaatccgggcaatatcattcattgatactatgcccggatttttctgcaatctgaatcttttacagaatttgagtaaattccgacacttattttatgcagttctatctttatgagatttcatcaacatcataatacttaaaatcccggaagcaggcacttcctcctgtttcctctgccgcatagcagaacagaccaaaccggcaaccagtaaaatgatccagtttgaagtacagcttatgcacggttccgatgggtagccagtctcccttatttacccggtaatagcagcgtgcttcatccttcatgttacagaaatctgcttcaagacgaaaatccatctggtgtgattcaacaacagttccttccgtcatatccaatataccatcttcttttttatccagcataaggacttcatattttccatgatgttttgtaatgccaactgcagcataacagccctgcaacgcacacaaacctgcgacatcgccctctttcaatgcagaagcatcaacagtaacctcagctgcgcaggacggataactcatcctttgcgtaagcgtatttactgcctgtgtaagctctgtacaaacttcccgtgttgtaattgtataggttccctgcgatgcatccagatgataataccgtggatctggatcatgattaaactgccagcgcggaagcagcccattacagaaatcatcacttcccactaatggctgataaatatatcctggtctggtactgtgaacctctatttcttccggcacatgtccgttctgtccaaaaaccggaaaatgatccttccaggtaaccggaagcagaataggaatccgtccaactgctccggaatcctgaaacagcattgcataccactttccatccggcgtatccactattcctccctgtgccacgccctgtccacaatatccacgatcatcacaaagtacatctccacccgtgaattctccttccagagaatcactgtaaaagcatgcttccgtccgcatccagcggtctctcagggaatgaaccagaaaaatataataatagccgtttattttttgaatatgagaaccctcatagcctagctccgggttcttatgatcactgactaaaagacgatgtaatccgtccttctttggtgcagtcaaatcttcattcaattctgtaatccagatttcatcatttccatatacaatatagtttctgccatcctcatcaaataataaagagccgtcatgataaaagccttctatcagctgctttttccatggaccatctattttttccgaagtatacaaataagtcttactggtatcatttgccacaaagcaaatataaaatcggccttcatgataacgcagggaagctgcccacatgccctgtccgtaaatattatgaccgcttttcagttgctgcgcatccgtatgatccaacgtctcatagacataagtcacatgctcccagtgcaccagatcaaaagactgcagaatctcacagcccggcataaagtgcatggttgtggataccatataataggtgtcttctacgcggatcacgtccggatctggataatccaatcttgttataggatttacattcattgtttattcctttctattttatctccatattctttctttgttctattctattcaagaaccaccgcattgtggacggcctcctttgcatccttgccccaggaaaacagtgtttacaaaatataatctgtatttaattatttaaactgagccagacgttcctctacctgagccatcatctgctcatactttgcaagcttgtccttttcctcctgaaccttttcaggctttgcattgtttaagaatttctcatttgagagcatgccccttgagcgcgcaagctcctttgtgagcttatccttttctttattgagtctttccttttccttctcgaaatcaacaaggtcctcaagcggcaggtatgcaaccgcatcaggtatcactactgatacagcgtcatctccaataccggccttgccctgctgtactgtaatctcgctggtaaatgcaagatttacatatacctccttgttgtcctcgaatacctttctaactgcctcatcatcacttgtgatgaaaagctttgcctttcttgaaggtggaacatccatctgtgtacggacatttctgataccctttacgaggtccttgcagtgctcgattgctgcttcctcagccgggaaattccactcttccttgtactcaggccatttagagagcatgatagtctcctcgtctgactgaagtgtgcagaagatttcctctgtgataaacggcatatatggatgaaggagcttcagtgcatttacaagtactgtcttaagcgtccaaagtgctgcatttgctgactctgggttttcatccttcttgtaggtacgaacctttgcaatctcgatataccagtcacagaactcgtcccagatgaagtcgtataccttttgtactgcaattccaagctcgaacttgtccatgttttctgttgcatcctttgcaagtgtatttacccttgaaagaatccacttgtctgctgcatgaagttcatcaagctttggctctctaagctctacaccttcaaggttcatcatgataaatcttgatgcattccataccttgttggcgaagtttcttgaagcctcaactctctcccagtagaaacgcatgtcatttcccggtgcatttcctgtgataagtgtcagacgaagtgcatctgcaccatacttgtcgataacctcaagcggatcaattccgtttccgagtgatttactcatcttgcggccctgagaatctcttacgagtccgtggaaaagcaccgtgtggaatggtgccttgcccatctgctcatagcctgagaaaatcattctgattacccagaagaaaatgatatcgtagcctgttacaagcacatcgtttggatagaaataatccagatcctctgtcttttcaggccagccgagtgttgagaatggccagagcgctgatgagaaccatgtatcaagtgtatcaggatcctgtgtccagtgctccttgccacacttaggacatttgccaggcttttctattgaaactaccatctctccacagtcatcacagtaccatgcaggtattctgtgtccccaccagagctgacggctgatgcaccagtcgcggatattgtctgtccagttgaagtatgtcttgtccattcttgaaggaagaagcttgatttctccgttctttactccctcaaccgcaggcttgatcatctcgtccatcttgacgaaccactgctgcttgatcattggctcaactgttgtgtgacagcggtcatgcacacctacattgtgtgagtgtggtacaacctttactaaaaggccctgctccttaaggtcctcaaccagtgcctttctgcactcgtatctgtccattccggcatattttccggccttttcattcattgtggcatcatcattgattacaacgatttcctctaagctgtggcgttttcctacctcgaaatcgttagggtcgtgtgcaggtgtaatctttacacagcctgttccaaactctttatctacgtatgaatctgcgattacaggaatctctctgtctgtgcatggaagctttaaggtctttccgatgatatcctgataacgctcatcatcagggtttacagctacggctgtatctccgaaaagtgtctcaggacgtgttgttgctatctctacgaatctgccttcctcgccaactacaggatagttaatgtgccagaagaagccgtcctgctcctcatgctctacctctgcatctgaaatagatgtcttacataccggacaccagtttacgattcttgagcccttataaatccagcccttcttataaagctttgtaaatacctcctgtactgcgtgtgagcatccctcatccatggtaaatctctcacgctgccagtctgctgatgatccaagcttacgaagctgctttacgatacgtccgccgtactcttttctccagtcccagcatttctccaggaactcttctcttgtaaggtctgccttgttgattccctgctccttaagtgcctggatgacctttacctctgttgcgatggatgcgtggtctgttcccggctgccagagtgcattgtagccctgcattctcttgtatctgataaggatatcctgcatggtgttgtcaagggcatgtcccatgtgcagctgtcctgtgatgtttggtggtggcatcacgattgtgaatggttttttgctgcggtctacctctgcatggaagtagccattgtcttcccactttttgtaaagacggtcctcgatgtcctttggatcgtaggttttgtttagttctttgctcatgttttcctccttttatatgaatgacgcaaaagctttgggggctttgttgtgtcaggtcgcgcattatgtatggaattatgttcatgattacgctgccaagacactgtaaaaattatgattagggattgcttagaccatgacgcaaccggcttttagcgccgtccatggcgctaacgcctcgcccgcacgtccatgtacgtgcgttgctgggctgtgtacataattttaacagtctctaggcagctccataaatcacataattccatacataatgcgcggcctgataattcaggctgtgagcttttgctgtttttcttttcatttagctatgggcgaccgattggattgcatgcgcaatcttccggtctgggtacataaaaagaccctcccgatcattgaccggaagggcgaattagcgctgtaccaccttcgtttacatcggagcatatatatgcatataaactcgaatgcctcttgtcctgtaacgtggacgaatcggaagaacttatgtcgcttgcggctttctgggttcttcggctcaaaagctaccttccatgatttctgtcttaagcatctttcagcctgcccaaaatgtatcaccatcttacggaccggatgctctctctgaaagctttcgtcatgtactcctctttcttatgcctttaaatatttgcctgtttctttctacaatattaaagtgcattgggtgatttgtcaatatgatttttcaatcatcataatgacctttacatgaaacaatataaattatctcatctttttcataataaacaattcgattagtgtcatcaatgcgtctgctccacataccactaagattttcctttaatggttccggtttacctataccctcaaacgtacttcgctgaatatccttgataagtccattaattcttttcagtgttttcttatcctgcgtctgccagtataaataatcgctccatgccctatcttcccatagtaacctcattagtcctcctctatcaaatcatgctctgcgaagtgagctttgccatccttaatatcgcgcacgatattttccaaataacggatattgctatcagaataaaacggatctaccgatacctcaaaaggaatacgcttttctctgcctactttttttgcaaaaacggtgaacgctgcactcatagaaagacctaattccgaacacacctgttccatgcttttttttacatctgcatccaatttaaaattaacattaactgactgtgacatatacaacactcctttcttgcttatagtatatgcaacagcaaagaaaatatcaataagatttctttattttttctttacttatattcaacattcttagttgcgactatatccacaccggttgctgcaacatcgcttagcagtacatcacctatatgcaccggtgcctctaccgtgatttggttgatacactccatcacatccattatcttttcctttggaatatcctgtgccgtctttacggataccatcggtattgtgccatttttcacacagactgtacttgtcacaattcgtgtcggatgcgttacttcctttgctccgtagtctgctccgcgcttgcaggtatttccggttactgtgacattttctccatctattgtcaccttaagggcacatcccagaggacagcctatacatgtcaaatttctttcttccatgatactatgcctcctcaatctttatcgtaattgtgcggggattgtctgtttcgatgagctgcttcttcttaagcactacctgctccatctcacccggcgccataacaggacgcttgcggtgctgcagctgtttatcatccagatatactgcaatatagcaattcttatacacggctcccactcgaaatcttaccgtcacagtatcatccatttgtgcagtatttatagtgcttggaacagtgtatctgactccgcctgtagcagttatcgatatttcttttccatcgcaactcttatcaccaccatttttcacatattctgcggcatggcggcctgctgctgtcgcttcctctgacacataatccacgaggtcatgcacatgaagcacatttccgcaggcaaatacaccgggcacatttgtctcaaggctttcgtttacgaccggtccgcttgttaccggattgagctctacaccggctgtttttgaaatttcattttccggaataagtccgcatgagagtaaaagcgtgtcgcactcgtaaaactcctccgttccctcaataggcttgttgtgctcgtccacctgtgcgagagtgataccctcaacacgctccctgccctttatatcaaccactgtgtggctgagcttaagcggaattccaaaatcatccaggcactgcacgatattacgcttcaagcctcctgaatacggcatgagctctgcgactacctgcacagtggcaccctccaaggtcattctcctagccatgataagaccgatatctcctgagccgagtattactacctttcgtcccggcatgtagccctctatattcaccagtctctgagctgtgcccgccgagaaaattcctgccggtctgtagccgggtatgttaagagcacctcttgctctctccctgcagcccatcgcaagtattacggtctttgcagcgatatggaaaagtccgtctgtgcggttcatagctgtaactattttatcgtttgcctcatcttttatctttacatcatgcctgtcatctgccccgttttcgaactcgccaccggttgagatgtccatgaccatcgtattgagcctgtactctatgccaagctctttgacctccttgataaatctgccggcatattcagggcctgtgagttcctccttaaaggtgtgcaggccaaagccgttgtgtatacactgatttaagataccaccaagctcacagtctctttccagtataagtattttatctattttatttttcttagcggaagctgctgccgcaagacctgccgggcctcctcctactatcacaatatcgtaaaattccatattgtccccctatgttaagctgatattaatccaatatcaagctatcgtcacctgtctcttggaaataagacagactatccgcgattcttgctcattccaacaactatctttgactttccaccgcttttagtgatgtcaagctgcgaaatgcctctctccctggcgataatctccatagttctcggagaacaaaagcccgcctgacatctgcccattccggctctggtgcgtctcttcacaccatcaagtgactttgcgcccagcggtctgtttaccgcatccattatctcgccctccgtaatcatctcacagcggcagattatattgccatactcaggcttttcttttatcagctttttatactcatcctctgaaagcttctttggatttaaaataccttttcttgtctcaatgaagtccgcatttttagaaggattaaaaagctcctcaactattgctgccactctctcaccgatagccggcgcacttgataagcccggtgactctatacctgcacagtccacaaaaaatggtgcatctttaagctcctcgatgataaactcatgtccgtcctcatgtgcacggtttcctgcaaacgatgtgatgacttgacgcataggaagtgacggcaccgaacgtgtgccggatgtcgtaacatgcgctaagcccgctcttgttgtatttgtaccatccttgtcatcatgatcatctgctgtaggtccgattaggatatttccgtgtactgtgggggttacaagcacgcccttgccgtattttcccggaagctggaagattgtcttgtcaacgataccaccagctgccctgtctaatagctcgtactctccgcgccttggtgtgatatggattttgttttcactcaccatgttgtgaaatacatcagcatatacaccggctgcatttacaacgcagcgtgcatgaatttctccattttgagtaatgagaatatagcctgcctgctccttttgtatctccttcacctcggtgttaaataaaaactccacaccgtttgccgcagcattctcagcaaatgcaatattcatgccaaacggacatacaatgccccctgtcgggcagtaaatagctgccacaacttcatcagacagattcggctccatctcatgcgcttcgcctgcatcaagaattttaagtcccggcaccccgtttgcaatcccctgattataaagctccttaagccttagcatatcgtcatcactaaagcacactatcagtgaaccgtttcttcgaaactcaaaatcaagcttcttcgaaagctcatccatcatctcatttccacggagattcatctgtgccataagtgtaccggtcttacaatcaattccggaatggacaatagcactgtttgcctttgaagtgccacagcacacgtcctcctccttttccaccacacaaatggacaggttatatttcgaaagctctcttgcacaggcacttcccgatactcccgctcctataattactacatcatacatgttattttctcctaccaatttccatacattgtttaattgccgtatcactaagctcatttaaaacaatgcaagcataagctattattcatccttcgcccagttaaatgcgcaggcgacagcctttttccacattttaagcttcttttctctcaaatcagccgctatctccggctcaaacacacggtcaatagaccagtttctctttatatcatccatgctttcccagtagcccaccgcaagccctgcgaggtacgctgcgcccatggctgttgtctccacgcacacaggcctgttgaccggtgcattgctgatatcagcctgcatctgcatgagcagattattggcactggcaccgccgtctaccttaagtgatgtgagattgatgcccgaatcagccttcattgcctcaagcacatcatttacctgaaatgccattgattccagagttgcccttatgacatgatacttgtttacacctctcgtaagccccacaattgttcctctggcatactggtcccagtacggtgctccaagccctgtaaatgccggcaccacgtagcagccgtttgtgtcttttacctttctcgccatgtactctgaatctgttgaggaatcgataaatttcatttcatcgcgtagccactggatagaggctcctgccacaaatattgatccctccagcgcatataccaccttgccgtctatgccccaggctatagtggtaacaagtccgttctttgaggataccggcatctcacctgtgttcatcagcagaaaacagcctgtaccgtatgtatttttggcttctcctgccctaaagcaagtctggccaaaaagcgcagcctgctggtctcctgccgctcctgcgattggaatcggacccccgaaaaacacaggattcacctcaccatatacacagcttgacggcattggctttggaagcatgctctttggtatatcaagctccttaagtatctcatcatcccactttaaggtattgatattaaacatcatggttcttgaagcattggaataatccgtgacatgcacctgtccctgagtgagcttccatataagccatgtctcgactgttccaaacaaaagctcgcctctttcgactctctccctcgctcccggcacattgtcaaggagccacttgagcttagttgccgaaaaataagcatctatcacaagccctgtcttttttctgaaggtctcggtaagccccttttccttcagtgaatccgcatactctgccgtgcgtctgcactgccatactatcgcgtgataaaccggctctcccgtatttttgtcccacacaatcgtggtctctctctggttagtaatgcctatcgcacatatgtcggctgccgtagcctgaatattggccatagcctcctttgccacctcaagctgtgtggcccagatttcctctgcatcatgctccacccagcccggctttggaaaaaactgcgtaaattccttctgtgccacactgcacatctcgcccttctcattgaaaagtatacatctgttgctggtcgtgcccgcatctaatgccataatatactttgccatgtaaaaatcctccaactctctatatttccagcttttttccttctatcctgctacaattcttcctctaccatgctcttctctctgttgaacgcatcatagatacatggaattactataagcgtaaggatggttccgtatacgagacctcctattattgcgattgccatcggctttatcatatctgagccatctccgatacctatcgccgatgtaaacattgcgagtatggtggtcatcgctgtcatcagtattggacgaagccttgtacggcctgcgtctatgattgcctcatgcttgctcatgccctctctcctggcctgattgatgtaatcaatgagcacgattccattatttacaatgagacctgccagcatgataaagccaagcattgatatgattccgagctcatttcccgtgatgaaaagagctataaagcctcctgtaaacgcaagaggtatacagaacatgataataaacggtgaaagcaatgactggaactgcgccaccatgataagatagataaatatcactgctagcacaagcataagtacaagctgactcattgactcatttattgtctcatcctcgccctccatgtctattgaatagccatcaggaatgctaagtttatcaatttttgatttaattttatcgcttagtaatgttacattatggttttcatcaaccgcacctgatactgtaatatatcttgtctgagcatctcgatgaatggtacttagtgtctgttcctgcgaaatagtgcagatatcactgagcggaatctccttttcactgccatcattatccttataggtaaatgtaaggtttttaatgtcgtccacagtcacatcagactgctctgcagattgtaggtatacctcatagtcctttatgtcggtcgtaatggttgttgcactcttttgagatgatatctcaccggatacgagctggtatacctgagccaccgtatagccatactttgctgctttttccttatccacagttatcttaagctcattgattgtatctccaagaccgtcatctatatctgtcacgccctttgtgtccttaaggatatctgccacatcacctgcaagcttctgcagcttgtctatatcattacccttaatcctgacagagagaccacttccgaaaaactctgatgagtccatagcctgtgaagatgctgttaccttgcagtccagattctttgtgcgtttttcaatttcatctattaccttatccgatgaaacatccgacttctcatcaagcaatatatacatgctcacgctgtcgcttcctgagctcatcaggttcatggtcgagctgccgcctgctgtagctcctattgtgtctatgccctttatatcagatattttgtccatgaccttatcagacagctctgtaagctgcttgaagtcgagcttttcgtcatcctttgcctctatggtaagtgaaatctgatttgactccatgtccatatccataaatgtcattccccttgacatgcaaagtgcgccactgccgactaaaagcactactgccgcaataaataccaccggcttaaatctaagacatatgccgagcacatttgcataccaatccttaaaacggtcaaaccatggatgctttatatccttcgtctttttgagcatgcctgaagcaattgccggtacaaatgtgagtgccacaacaagagatgccataagagtaaacgctaccgtaagtgccaggtctacaaagagctgtctcgtgattccatcagtaaaaatgattggcgcgtacacacttaccgtggtaagtgtagaggcaaaaatggctcctgccacctgatttgcaccctcaacagccgccttctttaccgaatatccttctccccttaatctgtagatattctcgattactacgattgaattatccaccagcattcctattccaagcacaagtcccgacattgaaatgatatttaaagtgatatccgtaaaatacataagcaccacagccacaataaccgatagcggtatagatgctgcgataacaagcgttggctttatgtcctttaagaacaagagcaatacgaaaatagcaagtattgctcccactatcatattttccataacactctttactaccatgtcaatgtatacgccctggttcataagcactgtggcgtgtaatccgtcattttccttttccagcgaatcaagcttgtccaaaagacggtctgtgacgtctcctgtagagtagccggtctgcttctccatggagagcattattccgggattaccgttgactatcgcatatgtctcatccgaattgtcagtcatctcaacatctgccacatcaccgacatgaataggagctattccatcaagcttcatatccataagcactagatttgttaaatcatcaattgattttatctcatctcccacctgtactatgtactgcgtgccatttgaatcatttacatagcctgcaggcatatcaaagttctgtgcgacgagcagctgcgagagtgagtcaattgttaaaactgcatttaagtttgacttgtcaagtgcatcatccttactcttttcaagctccttttttgagctgtcaagagatgccgctgctgttgcaagctgtgccgactgctgtcctatgcttatcgagctgatggctgcctgactgtttagattatcataggcatctaaaagtgctgtctctccttgtgctatctggtcaagcccgctttggcactgctctatgcctgtattcacctgaatgagagtctgtgctatcgctgacgctgccgcaggcagatcatctgctgtgtttacggtgattccaagcgccgagagacctgaaaactgtgttgcaatctgcttattaacctgctcaagctgcgctttgagtgctgtgcccgcttcacccggtgcatttgcgccctctttgagtgacggaattgtctttgtatatgtatcactattcatgaagtctgaaagagctgactgaattgtttcaagctggctcttctgctcatttaagcttgcaagagtactctccagctgagttttctgctctgcaagctttgccttttgctcctttagcgtatccactcccgcgctcatctgatccgatgcagatgtgattgcgttttgtccgctctctatctttgcgcttgcatcatccatctgactttttgcatcgtcaaatttctttgaaacggcattatttattttctcattgagcgcatctatcttggcctgattcatcgtgacctgtatctgctcggtgagctcacctgttgcagtcactgatgcgactccttctgtgctctcaattgcaggctttagtgtgttttccacaaagtctgtgatttccgacttgcttttcccatccatatccacagcagtcatcatgattggaagcatgtccggatttatcttcataatggtcggagtacccactccatccttccagccagccttgacctgatctattttctgctgcatctctatcactacagaatccatgttggcattctgctcatactcgcatgtcaccagcgaatagctgttatatgacattgagcttacgtttttgatattggacgtagttgccatagctgcttcaagtggcgcggtgacatcgctctccacctcctgtggacttgctcccatatctgttgtcacgataagtgcatactgaaagctcatatccggcagcagatctgtcgtcatcctgccaagcgatacaacaccgagtactattaccagcagtactcctacaagtacagtaaaaggcttttttacactatatctggatatcatctgacccctccttcttcttttctttgataatgtcctgccttagtttgatagacaatgtgattactgcgattttcacaataaatttaattcgctgttatacttttattatacaatgtgtcggattgcaactcaattggtttatacttttttaagagattttgacaataaaaagacacccaattatacgattaatataattcgatgtccttaaatgtcttttaatctcttttaagattttttatttatttcagcttcaaatgccctcttcctcaatctcatcctcatcatcattgatacctgcaacagcacttgtaacggctccgattacagcgccaagcgcaaagatgataactaaaaaaataactataaagaatgctactaaaaaacctgtatctgtcatataatttacccccatagctgtctcacagcttctttaaaatatagttttagtttaacacacttgtctgtaaataacaatatcgtaaagggctaaattattgactaaatattgactaaaatattgatttatgaaattgatcagtccttgatctgcataccgtttgcatccatatgatagccttcagtcatgatcagctttgatactggaactatctcatagcccataccctgcagctttgtgagcatctcatcgagtgcctgcgaggtgtattttgcgcctagatggcagagtattatcgagccacaatccaggcttttgtgattgcacactgtatctataatgttttgcacaccatagtttttccagtcgagtgaatccacatcccactggattggataatagtcacagccatacactgtgtcaatcagttcattgttgtacgagccgtatggcggtctgaataccttcatatcctttccggtcagctccttgacctttttgtgcacatccattatctctgtcttcatctcgcctgccgtgattgttgccatatcatagtggtgctcactgtgatttccgggctcatgccctttttcaaccagcgtctttacacattcagggttatcactcacaaaccctcctgtcataaaaaatgtagcctttacgttgtgcttgtcaagtgtctccatcatactgtcaaaatcctctgctccccaggcacagtcaaatgaaagggctatctttttttctgttgtctgaaccgaatatacaggcagctttctgtccccgaactgactcacagcactgctaagtgtctccatcacctctatatttttcagctgtgatatgtcatactctctgccatataaagcgcctgtaataagaagcgccgacagcagcactccaaaaaggaatctgtgtcggcgtttctttcgttttgtcccattatgtagttttgtattttgcatgtatgctctgtattcactcatgctatatactattctttattatcacaaattatgaataatgaaataactctatttcagttcttctgcccttccgataaactcaagcactacctcaatcgactgatgcgcagccttctccgcaaaggtctggtagtctgtctcgccgccgtcgccgtctgatattgaacgaagaatagcaaatggcacattgttcacatagcacacatgaccgatgctgcctccctccatctctgcagcgattgcatcaaaggtattcgaaatataatccttctgctcctttgtggcaataaactgatctcctgttgcgatattgccctttttatagtggatattcctgtcagctaagcatgagcacatgagctccaccatttttgtatcagccggaagcaaaatcatattgatgcctgagaggagccccttcggatctccgattggcgatgtatccatatcgtgctgcagcacgtttgtggctactgccacatcaagcacatttaaatcctttgtcaaagttcctgccactccgatattgacaatcatatctacatcatatttcaaaatcatggcctctgcacatattgccgcaaatacctttcctattccgcattttgccgcaacaacatactgatcaccgattttgccctcaacaaactccactccgctgtaaacctctgtctgtgtgtctgtcatctgagcctttaagtcatcgacctccatctgcattgcaccaattacacctattgtcattttatttctccattcctgctatcttgctattatatttttagtcctcgtttactgtggataagtaaactccatatttgtctggctctcaagcacattaagatatgcacggcactccttctttgcctcgtcaagtgacagattctcgtaatgtccgcactctatggctgatgcaccaaataccggtccatcatactcaagtatctgttttaagacctctttggtgatttcaaaaaccttccccggctcgacatccctcacaacgagatagaagcctgtctgacagcccatcggtccaaaatataccacatcatctgcaatctcagagtttctcacacatgttgcaaacatatgctccactgagtgcatagctgaattggacatataatctcctgcattaggttttcttgtacgaaggtcgtatgtaacgatttctccgtcttttcttgaaatataaaatccaggtttaagaatattatgattaattgtaaagcttttaattctttccataaaaatgtttctccttacttagttgctgtctcaaactgcttcagataatcctcaaatacattgagtgcatcatccacaggctttggtgtgctcatatcaacaccggcactctttagcagctcgattggattcttcgagcatccaccgcacaggaaatttcctatatacttatccacagcaggctttccctcctcaagtatcttttttgaaaaagcaactgctgccgaatagcctgtcgagtactgatatacatagtacggtgtgtaaaaatgcggtatgcgcatccactcatatgatatctcatcatccacgcgcatatccggtccgtagtactgcacattcagctcatgccatagctcatttagcacatccttggtaaccggctcgcccttttgcattttccggtgagctatatgctcaaactcagcaaactgcgcctgcctgaaaagtgtcgtcctgaagccgtccagaaaatgtgtcataagatattttctctcattctcatcctcacaatgctcaagcatataatgcattagaagtgactcattgcaggtggatgcaacctctgccacaaaaatcaggtatcctgcgtaggtgatgctctgatgctcatttgaatagtatgtatgcatcgcatgtcccatctcatgagccagcgtaaacacactgtccagattatcggcatagttcaaaagcacatacggatgagtgccgtaagcgccccatgaatacgcaccgcttctcttgttctcattctcatatacatctatccagccgttctccatgccagccttaagtgtgctgacatactcatcgcccataggctcaagcgcctttgccacaagctttttcgcctcatcataggtataggtggtctgtacattgtccacaatcggtgcaaacaaatcatacatatgcagatgctccacacctaaaagcttcttcctaagcgccatgtacctgtgcagagccggtagatgtgcgtgaaccgtctcaatcagattgtcatatacgctctcaggaatatcgccatcggataaatacatggcccttgcgctgtcatattttctaacccttgcataaaaagtgtcatttttcagcttgctgatgtacatcatggaaacagtattactccacttcttgtacgaatcatagactccacggaacacctgcttgcgcaggcttctgtccttgctgcttaaaaaatctatgaaattgccgtgcgtgatacggattttatttccctctacatcagtgatatacgggaatttgatatccgcgttgttgaacatgctgaatatattctccggtgctgcagccatctcaccgcactgcgccaggatattctcctctgcagccgataaagtatgcgctttctgacgcattatctcatcaatcgcacgcttatagtgcataagctcattgctctcactgtaaaagctctcaagccttttatcatctatctgcaaaatctccggactcgcaaatgccagcgcacctgatgcctggacagtcagtgtctcagcctttgacacatatgcctgatatttcgacacagcagtgtcctgatgcgagcgctcattcgcatagacaactatacgctccaaataataagacagctcatcctgcttcttaaaaaaatcaagcagcgttgctgcactgtcggccagatgtcccttaaatccagatagcttttctgcaagctgtgacgctttttcacactcagcctcccacagctcatctgtctcatacatatcctcaagcttccatttgtactcatctgagatttcatctctcttttgaagccttttctcactcattttgtgttaccttctatcttacttttcttgttctcgggggttctgaatagttaccttgttttcaactcttcagaaccgccccacgcacattcgcaaaaccgcactatgtttttataaaactacccacacatccggcatgcaaaatgcatatagacgtgtgggatatatgtgaattataacaattaagctctactttgtaattaaagtgcccataccacctgaaactgtcttgccctctttgttgagctttgtgataagcactgaacggatggcagagtcaccgataaagtcgatagccgcctcaatctttggagccatggtaccctcatcaaactcgcctgctgcaaggtacttctttgcctcatcgacagtcatggtatcaagcggcttctcatcctccttgccatagttcaggcagaccttgtcaacgcttgtaagtataacaagtctgtcagcatcaagagtatctgcaagctttcctgctgcaagatccttctcgataacagcgcttgcgccctgaagcttattatcctgtgctaaaacaggaattccgccgccaccgcatgcgataacaacctgatccgcatcaacaagagccttaatagcatccttttccactatatcaacaggctttggagctgccacaactcttctgtagcctccctcaacctgtgtcacatggttgcccttcttctcttcttcctcagcctctgcctctgtcataacacggccaatgatctttgtcggatgataaaaagcctcatcatatgggtcaacaaccacctgtgtaagtattgtagaaacagtcttgtaaattcctctgccaagaagctctgtacggatagcattctgtaaatcatatcctatatagccctggctcattgcagagcagactgctgtaggtgtagctgtatactcaggataaatcctgcaaaactcagacatagcggtgtgaatcatgcccacctgcggtccgttgctgtgtgtgataacaacctcataatcgtccctgataaaatctgcaactgcctttgctgtatgctttgtagcctcgtgctgctccggaagagttgttccaagagcatcatgtccgagtgcaataactatttttttcttcttcatgccgacctcctatgctgcatccgctcaatgtgtattatatctcataatcataaacccatatgtatactatgataaatacacttatgaaccatcaattttgaataattctcatgcggtgcaaaatcaaaattatttatatacattatctaatattttatggaatttgtctagtactttgaactgatttgaacaacattaaccaacattctgtcacaatgcagcgaacgtaagccgagcgtagcgatggcgcacacgtaagcgcatatctaccacagcgtaagggacgtaagctccgggcaccggtggcgcacacgtactcttgcaggagcgaatagtgaagtggcttagatactgtagaaattatgtccatgaatcgagtaggaggcggtgactaaccgccgtcctctcacagcaccatacgtaccgttcggtatacggcgctttcaatagttgacgtgcacagactgataggctgtggctaaatcgtaaaagccactgtttatcagtctttctttattcagcgcccaaatcacagctttgttattgctgatataccaatactttctgcgactgtttgctattgttgacgcatagtgttctgggattccaagtttgactagatttttatatttcgttctaggtttcttccactgtttccatatgcacatgcgtattctgtgatagagccatccgttgatatcatctatgttgttcttcatgcttgcaattccgtagtagttaagccatcctcttgcatatactttgattttctcaaggcttggcttgattgactgacatcgcttacgggaagataactccttcagtctggacttaaacttcttccatgacttcggatgaactcggacatatatgccttttccgttccttcccaatgcaaagccaaggaatttaaaatttcggattgcaaacacgctgactgtacggctcttttctcggttgactgtaagtttcagcctctcctcaagatattttgtactgctttccaagagtctctctgatgctcgcttgctctttgcaagaagcacgatgtcatctgcatatcttatgcatggaacacctcttttcaggtattcctggtcgaactcattgaggtagatgtttgccaacaatggtgatagatttccaccttgtggtgagccttcctctgtgtcgatgaccactccgttttccattacaccgcttttcagatagcgctttatcaactgtactacacgttcatcttttacattcttccgcagaagattgatgagaatttcgtgattaatagtatcgaagtactttgacaaatcaaggactacagcatatgtatagccttgttctgcatactccttaaccttaagtattgcgtcttttgcacttctgttcggacgatatccatagctaccctctgcaaacagcggttcatagattggcactaactgttgggttattgcctgttgaagtgtacggtctatcactgttggtatgccaagctttcgcacaccaccatctggtttgggaatttcaactcgtcttactggagacggagtatactttccacgataaatgcggtcagttatctcttgttgatgttcctttagatatggaagagcctcttcaatggtcatgccatcaattcccggcgctcccttgtttgccttaactctcttatacgctctgttaaagttgtctttatacagtatcgttgtaagcgatgtataatcgcacggtttgtcgccaccaacttttcatgagataatcacttcaggagtgagtatctctctggatcagctgcatttgtagttggagccgtttgctctaactgtgattgattccggttgaattcactctgaataacctttaggagtgaattactatgagttcaaaaagactgcactactctgatgaaaagtggctggacctgattagcgaatgccggtcaagcgggctctctgataaggactggtgcatggagcaccaaatcggtatcagtactttttattaccatgtcaaacgacttcgcaataaagcatgcagtattccaccagctacggtcggtgccgtgattccctgtcagaagcaggaagttgtggaactgaatttcaatcctgtatctgaattaccaatgaattgtagttcagaggagattactgcaactgcgattaaaatctcaatgcatgggattcagattgaaatcaccaatgctgcggcagagtctacaattgttcaaacgctaacggctctgcaaaagttatgttaggcgatctgtccggtgtttccaagatttttgtaatcaccggccgcactgatatgagaaagagttttgatggactcatggctatcgtgcgggacagctacgaccttgacccatactccaatgccctgtttctcttttgcggaagagactgccggaaaatcaaggctttacacttcgacaaggatggttttgtcctgatgcaaaaaagattagatggcagcggtcgtttccagtggccacgcaatgcctcggaagcacgccagcttacaagacaggaattccgatggctcatggaggggctggcaatcgatcagcccaaggcaatcaaagctggaagccggaaaaaagacttctgatgtttgtacaaaacagagaaaaataaaaacttttttccggtcataaagcgactcataccaggcttatcaacagcattttttctatttttgctccacctgtggaataccggacggattcctcccgttttcttattccacggtggatatctaacctgaaaatccggaattatccattgaattacaggctctcaggttagatatccacaggattttattggtcaaaatgaccatgcataaaatcagccggtttgcgaaaaacctgatttatttttataataacagtagaaataaacaggtggtaaatcatgtcaaacagcagcaaccggcaaagtgatatcaacacttttctgacaatcattgaacaacagaataatacgattgcgctcctcacaaaaaacggcgaggacatgcagaataccatccgggatctgcgccagaccattgcaaatctggaagaaaccattgccgagttaaaccggagattctttggtatttcaagcgagcattccaaaaatatctctttgccagcagacaaggagtctgatatagctgaagatatatcagaggatgatgcaaaggagccgccggccaaaaccaaaaagagttcaaaacctcgcaagccaaaggcttcccgagaagaactttatgcttcgcttccaatctgtgaagtcaaatgtccactgccggatgatcagaagttttgtccggactgtggtaccccgttagaacctatgggatacacatttgtcagggaggaattaagagtaatccctgcaaaactgttccgggtccgttaccttcagcagaagatgcgctgtcccggctgtcatgaagaagatgaaacaacgattgttgcagcacctgctccagcgtctctgtttccacacagtccggcatcaccatcccttgtagcaatgattatgtaccggaaagcgggactttatcttccgttttaccggcaggagatggattttggcatgagtggtgttcccattccccgtgaaacgcaggctcgctggtttatcaaaggagctcttgaatatctggagccgatttacagccggctgcatgaggaactcttaagaagagaccttattcacgcagacgaagttccatgtcaggtattgcatgaggatggccgaaaggcaactcagaaatcctacatgtggatttatcaaagtggaagcgatgggaagcctccggtggcactgtatgaatatcagccaggccgggcaagcgtctatccgattgaattcctgaaaggctttcatggaatgatacagtgcgatggttatgcagcatacggatgcattgaagatgtaattcttatctgctgtctggctcatgcacgccgtaaattttttgatgccgttccaaaaggaaggcaaaaaagaatccggcttctggatatcaactcggagcaggtactggatgaacccatttctacagaggaagatgaaaatctgcttcctgctgaaaaaggagtcgccttctgcaatcgtctgttcttcaaggaacgtttgtataaggagttatctccggaagaaagaaaagcaaaacgtcttgaagaagaaacaccaatctgggatgaattctggtcctggattgacacgctggatccatccggaggaagcaaactggagaaagcggttaagtatgccttgaatcataaggaatcgttaatgaattatcttctggatggaagatgtgaaatctcaaacaattccgctgagcgaaaagcaaaggtttacgccaccgggcgtaaaaacttcctgtttcatgactctgttgacggtgcgaaagcaactgcaatcgttatgagtcttgtcgagacagcaaaagcaaacaacctgaatgcttacaagtatctttacaccctgcttctgtatatgccggactacaaaaatgagccctcaggcatagaacagctgctaccgtggagtatatttgtacaggataagtgttccggaatcatagatgatagcctggaacttccagagaatcgtgggaacctgccaatttagggttccctggttcggatacccgtgtggttattcatcgcttacgtatcgtttccaaaagtctcggctgtgcactgtctctttctttccatatccgattgaatgacctagacgctttcacatacccttcatgttccgcattatctctttgcgaacagccattgttttcaatgttttctgccatagacggtcattcctcctttctcggtcatactcaagactcctactgattcggtccttcacctctcggctactatgacctctgctgacttctatgcgttcagcattgctttatgcaatggttacctctttcaaggcataccgcacagacctccctaggtaccacacgtttcttcctctccatccatctgcctcatttatcatgcatgattccgtgtagttattgggctttaacatgggttgctgtcttacccacatgcatgacctcatatgagatttctgttcgtcagaccagagatttgcccgtgagttggtatattcctcacatccagcttccttcagattccatctcacgatggacacccttgccttcggctatatccttcccactaccgggcggattcgggactttaacccgttagaaacgtgcgccgctaggcgcacaacgcagaaacacccctgcatggacgcaggggtgaggagaaaacgcgccacggacggcgcgtttcgacggtttcgtcaagcatagaaacccttcaagcgtaatttcgtacagtatcttagccacgtagcgtagcgaccgcaagagtacgtgtgcgccgccggtagccggggcttacgtccagacctcccgccaatacactgcgccagaattactgctggatatcctttgcagagcttaaggttacttcaaccttgctctcttcgtactgtctgccactctgacgggcaacagtaagagtaaccttatctccggccttgtagctctttaacgctgactgcagctctgtcatagaagaaatctttgtgctgtcaacagcagtgatgatatctccctcctgtaagccggcatttgcggcacctgaaccagctgaaacagatgaaacatacacaccctgcgggaagccgtaggctaccatctcagatgaaacatcgccacccttgataccaaggtatgcctgattctcattagtatattttccgtcctggatgaggctctcaataataggctttgcaaccgacataggaattgcatatccgataccctcaacctcagttgaagaatattttacagagtttataccgatgacctcgccattttcatttaagagtgctccaccactgtttcccgggtttattgctgcatctgtctggataagcttgttattggtaacagtctcacctgtctgtgaatcctgtgtagttacggttctgttaagtgcacttactatacctgttgtgacagactgtccgtatccgagtgcattaccgatagcaattgcaggacttccaacagctacactttcagaatctccgattgtagcaatcttgatatttgagtaagtatcttttccaagatctgctttttttacacgtacaactgctagatcgtcatccggatctgttcctctgatttctgcctttaccactgaatcatcatcaaactgtactgtgagctcctctgaatctgccacaacatggttgtttgtagcaatgtagagataatcatcatcctcactcacaatgatacctgagccgcagctctgagactgctgtgactgctttccgaaaaagctgttgtaggtgactgttcctgtatttgtgatagcaacgatgctaggcataacctcatcgacaacagatgatacatctgtcagatcctttgcataccctgaggatgtctgcttagtccctccggatgttgtagtggtaagctttgcacttgcagtagaagaatttgaaatagctctcgtgccaatatagcttactcctgtgaaaacgccgcctccgacgagtccgaagataagagctgccgctactgtctttgctgcaaatggtccaaacgcaccaggttttctaggtgctctctgcttcttaggctttgcagcctgctggtatgcctgaccattcatattcatccggctatatgagttgtctgtcgaaccggctgatgcgccaccatatgcattattatttgtgcctgaattatatgcctgattagaataaggctggtttgcatatgactgatttgcatttggctgtcctgctgcagaagcctgcgaatatggattgtaactctgtgaatagctttcagctgatgtattattagtctgtgcagccttctgtgactcatccggattgtaaggattacccgacattgtgaaatttacattgtttgtattgttatttgtgttatttgtactgttagtattatttgtatcattcatatttccataattgttatccataataatttctcctttcgtttacaattagaagtatactgtcaatctgtgtttaatttgtgacgggattatttattttttcataaattgtaatccccgtgctattctccgaataaaaataactgctcatcggcagatgcacctctaagtctgcgataaatagaaattgcagaatatcaatacatccctgccaatgaacagttaccataaatcatatattaaatttcaattccgttcttctcaagaagagctctcgctgtttcaaccgaatctgtacctgtcgcattctttacaggtgcaaactccttctctctgtctacctcaaatggcaggctattgtccatcatgtataccatatcgaggatgagtgtctcgaacttgtatgcattcggattctcaggcttgtgctctgtaccattctcatcaatgtaaggtaccttcttctctaccacatgaagcggaaggctcttctctgcgatagccatgagcttgtccacgcggaataaatagtttaagataacaccaaagccatactgcaatgaaccattctcgttctttgcctctgccatctcaggagtaagctcgtaatactcaacaatcgaaggcttgccattctcaagacacatagcaccaactctctcatatggatcacattttctgaccaccttagagccgctgacacagccggactcgattgtagcacccacaaatacaggatcggcaatctgctgaagcacattgtccacagcaaatacattgagccactcaacacccttgtccttcaaatccttgtcaagaccggcattgatgagtgacttgaaccatccaccgtttccgtttggtgacatagcaagtgaatcctcagatttcatgagcagatttccatcaaaatcaactgccggaaccatctcctgcacgaaaaacttcacatagtccttgttgtatccaaaatagtcgtgctcttcaaagaactctcttgtcatgctatcatttatctcgcttgtcataacatacagaggcacccatgtaccggtctgatttgtaaccttcatgaggtttgcgacaagctgctcaaagatatagagttcctttgtctttccgatattgaacatgcccttagccttgtcaaagccaagacgtgtaccctgtccaccggcaagaagaattgcaccgaccttgccattcccaaccgcatcaaggcctgttgcaaggtatttgtccttatttgcctctatctctgaaagctccatagcagcaagcggtgaaaatgtacctctctgctgctccttgttgttaatcatatcaaggtatgaccagtccatgtgctcaagctggctctcaagcttagccggagcttcctctgttaagaatttctttaagtatttctggtttgttgccgtgattttttctttgatttctgttttcataaattctccctaaatgtattcgtatcttttttgaattacattattataacgtccgggaccaatctaatgactggtcccggatattatttttgcaattttcgtaaatataaatcttgttcctgatagctgactttaacatttagtcatctgaatcatcggatgaggattttgttgtcgagtcattttcagattctgactgactcttcttcagggcatcctgagcatctttattttttttcttagccccttcagttccggttgaaccagcagtattattatactttgttgtatcatatatatcggtctttgaatcaacatctgtctttttctgtacagtatcacttatagactgtacagtatctgatactgtgtatgactcgtcctcaaaaagatacttatgcaactgtacaacatctgtagccaaatcaataggaataaccgtatctcctacaccagaaagttcctttgtagcaacattatatggaaatcctgtagtagatgaaatctgatacttagtaacatttttcgccagtgccaagatttctttaaccgtaaaattagtactgatatcgtccatcattgacgaacacatggatgtaagtgttgctatatcttcacccttacacttttcgagtatcgcctgcaatacaattctttgtcttgacgcccttaagaaatcatctcctgatgtatatcgaattctggagtatgacactgcttgtacaccatttaaatgtactcttccttcacccttcaatgcatcacaaggatatcctattgaattagccgtttcagttatatatccgttaacccaatgaacttcttccttagtaagatctagatccaaaccgcctaatgcatcaataacatccacaagcgccttccaatcaacacagacatacttagtaatattcatatccagattggaatttatcattctgacagcattctctgctccaccaatttcaaaagcattattagccttataatacttgccctttccaacagacaaataggtatctctgtataaagaagcaagctttacttcatttgtatcatagtttaagctggcaatcattatacagtctgaattaccactttcatatttaccactcgaacgattatcgagtccgaataaagcaacatttaagtaaccatgcatagtctgcacgctttcttcatcaatatcgtcattaatgccggcttcgctggctgagagatcattcttgaaatcaattttacctattgtactattatataatcctaaaacagccaatactataattaaaactaatatttcaaatacaaataatactatttttttacgacctctttttttctttctcttctttgccatgttatttttccttttttctatgaatgtaaagccacgcgtctgcgtagtcctgacgctccttctctgacatattggtatactttccaaactccagattcgtcagtcgcatctgcggtctgccacacttgaagcattcaacctctttccttcttgaaaccatccgtatccagccacaatccgggcaaatgtatattttcatcatagtccttattcaaactgtccgagaacctcagctgacaaagcatcaagcttagcctgtgaatcttcaagagacactcctttaactccgaaatagaatttaatcttaggctctgtaccagaagggcgtacacagcaccaagcgttatcgttaagttcgtagtaaagtacattggaagaaggaagacctgtcggctcaacctttcctgttgtcatatcttttcttgtgtcattcttgtaatcacggatagcaagcacctgataatcgccaaacttctttggctcagcggcacgtgcctttgtcataatctcatttatctgtgcggcaccatcaataccctttaaggtcagtgtagatatgccctctctgtagtaaccatacttctcgtacatgtcaatcatgccatcccaaagtgtcttaccctgtgacttgtagaaggcagccacctcacacagcatacaaactgctgcaggagcatccttatcccttgcatatgtgccaggcaggcatccgtagctctcctccataccgaatacatagttgttgcagccggtcttttcgaatttgagcatctgctcaccgatatacttaaagcctgtgagcacctcgatatgctttacaccatatgctgccgcaattgccttacccatatctgttgaaacaattgactcaacaaatgcaggcttctcaggcaaagtaccattggcactcttctggcttaaaatgtactcaccgataagcatagctgacatatttcctgtaaatgtcacatactctcctgtctttgtatccttgcaatatacaccgagtctgtcggcatcaggatcagttgctaaaacgatatcagcatccttttcctttgccagctcaagcgcgagcttccatgcatcaggattctcaggatttggataaggacatgtagggaaattgccatcaggtactgcctggcttggctcaatgtatacattctcaaagcccatatccttaagcactctctgtacagggcgaagtcctgtgccgtggagtggtgtgtaaacaatcttgatatcctttgccatagccttgatgatctcaggatggatagaaagcttacgaagctctccgaaatatccctcctcaacctcgtcagagatgacattgtaaaggcctgcctcaatagcagcagctttgtccatagtctttacctgatcaaatgatgtaacctttgccacctcagccatgatgcttgtatcatgaggtggagtaacctgtgcaccatcctcccagtataccttgtatccattgtactcacgaggattgtggcttgctgtgataacaacaccggctattgtaccgagtgtccttactgcgtatgacagctccggaacaggtgcgagctgtgggaatacatatgtcttgattccgttagctgcaagacagagtgctgtggcatctgtgaactcatcatgcatattacgtgagtcatgtgcgattgcaacacctctctttactgcgtcctctccctgtgaaagtatgtaattcgccagtccctgtgtagcctgacggactgtgtatatattcatcctgttggtgccggctcctatgacaccacgaagacctgctgtaccaaactcaagtgtgcgatagaatctgtcctctatctccttatcatcacctgcgatagccttaagctcagcctttgtagcctcatcaaaatatgggtctgtgcaccatttctcgtactcagctctaaaatccatttatattaacctcctgtatcagctagtaaataagcctattaatgttaaccataccgattttaccacattaacgtgcatttgaaaagtttttgttccttaatattttcttacttattgatttttaaacacaaagagcttgctaattatgtaattgagcaccactaccaccacctgggcagccagcttcacccacatgcttgggtacgaaagcatcgttataaaaacaaaaataatagtttcctcaataatcagggtaaaaaatctgccactgaaaaacgcaaacatctgcacaagtgctgctgtttttgtaggtgttgatacgcgaaatacccatcttttgttgataatatacgaaaaaagcaccgcaaatacccaagcaagggcattcgctattaattcatttattccaagtgcaacattaaacactgcatatgacgctatgctgattataaatgtcatattaccaaataccgtatagagaaccagttcctttaaatcttcttttctctttttcatgtcatatccgtttcatcttataaaatcttcgttaatctgcgattttactataatagcgttatgaatgaaataagtcaatgcctatttttgtatcttaggttcccaataaatggacgcctcataatataacctgcatgttccacttttcatatcctcacgaacagagtttatcatttcttttgtttttttcacacatttattccattttacaatatccccggtacttttctcagagctgacatcatacttattaataatatactttccaagatactctgtcattttttccattccattaatatttaaatgctctgcatcactatagtctgccggtacatctatacccaattccttcgatttatcgtttaaattcaaaatatcatatccatattcggatataatagaaccaattttatctatagcttcaggattttcaaacttacgctgatgtggaaatctgacaaacaataccttttctatattttgagcctgaagataaaccaaaagttctctcagtgcatcttcacagccattatcaaagtcaatattctgcaattctcccatctgagtacctttatcacttccggacaccgtacaaaatccctttaaatagctttgtttattaagggtcataatgcttttttccagtgtatttttagccagactaattggccgtttccaattaacatgagaaaacgccatattaaaataaaactgacctttcccttgccctttaagaagagaatcaactgaatccttacgtccataaatatatggaacattatctatccaacgatgaagctgcaccggattttcaaagtcactgcttccatgcagatatccattcagtgaaattacaatcaatttcggattctgtctctccaagcctttttttatcatatctttatataaatttgccggagcggctcccattgacaaatcatatgacgtatatccatagttttcccaggcaattgcgggggaatagtcagaatacacttcacttgagcctatcattagcacatccaaggaatccttttgctccataaaaaatccctgaacattcatctgcgaagggctgtcattcactgaaaagactatacttatcatctcatataaaacaataagtataacccaaaaaagaattatacttattatatttctttttcttaacatatcatatcttccttatatccatccatacttatatatagtatacctcatttagcgatataatactttaagaaatccttatttaattattaaagtattttacattctttattttctttatcattaagcactgtccttacaatatataacggtctttccttaaccggcataaaaatattgccaacataagttccaactatacctatacacatcataagcagtccactcattaaacaaatagttgcaatgatacttgaccagccgcttgtcacaacacttgtagtaaaataatgaacaacaatttgttaacagtgcctgacccaatgtgatccttttctgaatttaatatttaaatagttttgccatatacatgtttacaatattgtagccataattcttagcagtcgcccaacctcttccatatgggttctcctggattccaagccattctacataatgtgctgttcctcttcttacatgttggaaccgggtatccacgcatggctgattcagaccatcggttgatgcataagcttttaagtgctgtacctgtgcccggattccttcccttacactgccaaaagaatttcccggtgccccattaccggttgctcctaatccagcaaagttatactggttaatctgtacatctaccccatatcgtaaaaatccagtctccagcattgcctgacagaatgctacttctgctttcaaaccttctgcctgacattcttccagatatatccgacaaaatgtttctattgtcggtgcatcggaagatgcatagaattccggataagtattattagcattataatatgcaaccatctgtgcaagattggtactggttgttcccatgatttcatatcttgctgtcacctgataagcggtacaataactttctactgttccatcacttgttcttgattctacatatacccagtaattaccagaatccggataccaggatacccagttgcttccagtccagtctgtcaatgtagaccaactgccagtgctaagatcatatatctgccaacggaatactagtgatgtatcgttgctattataagatacgccaagatttattgctgctttatcattcacactgcagattccattaatcgttatgtatttataattgtaatttcttgctgcataaaagcagattgtataatccttcgtcacaccatctgatgtccgtgctgtaacatgcatccagtaattacctttttttggataccaggatacccagttacttccggtccagtctgctaccagattccacttctgcttatccagattatatgcttcccatttaaatgtcaaattggaatcgtcactatcatatgcaattcccacatcaatccgatcatcataaatattataacacattccattgaggtttaatgagtgatgggaatagtctttctgtgatgcgaaacacataattgtattctgtgtcgcaccatccggagtcattgcctctacatacagccaaaagttgcccttttccggtttccaagttacccagttgcttccagtccagtctgctaccagactccacttatgtttatccagattatatgcctgccatctgaatgtcacatttgatgcattgctgacatatgacacacctacatcaatacccttatctctcatgatataacacattcctttcagatcaagataatagacggtataattatgtgtcgccacataggaaactgtctttgtcgtaccatttccattgctatcaattgctgctacctgtaccgttgcttctcctgccagcattaagactgccagcaaacatgctgttgctctttttaatatcttcttcattttacgacttcttccttactcgtatctataatattccttaaaccatgttacaaattttcctaattcttcatcaatcgaagtacttggtttaaaatcaaaatcatgcatcatattgccattattgtaaatctggattgtttcacctgccataatcttatattcttttattcattaaaactatataattaaagtattttacattctttattttctttatcattaagcactgtccttacaatatataacggtctttccttaacctgcataaaaatattgccaacataagttccaactatacctatacacatcataagcagtccactcattaaacaaatagttgcaatgatacttgaccagccgcttgtcacagcacttgtagtaaaataatgaataattaatccaataataaccaatgccgagcacatagacacaacaaatcccaatccgactgtaagttttattaacttgtccgattgtgatgtaagaatcgatgtagccatcttcattcgcttcttaaaattatatgaagattttccctcatacctttcttcatgatgaacatctaatgtgccaattctaaagcccatccattttacataaataacaaaagctctgtgaagctccctcatcttacaataattatctaccactattcgcttactgatgctaaaattacataaagccgggtcatagttgccatcggaggcccatgaatatatcttgtagaaagcctttgaaaccaatactttcataaaagaatcttttcgttctgcacgtcgtgcaaatactgcatctaattgatcatctattgcttttttataaagatttggaatttcctctggtctgtcctgtaaatcacaatccatcacaacaacccaatcacctttactataatccaatcctgcagttatcgcctgaatctgtccgaaattacgtgacaattctattccaacaacatgcttatcttttttgcatagctgctgtattacctcccacgaattctgtggacaattatcatttacaagaataatttcatattctttatccatcgcaacaagtgtatctgttaatctgcgatgtaattcttccaatgctgccctgcaaccataaattggtattactactgatatatccatatattatcctctctaattacttatttatccgaatactgagtatattattattccgcctactataaaaaacaatgctataattttctttttattaagtctctcatgaaaaatcttcactccaaatatcgtaacataaatataacttgttgcctctaatatcggtcccattgataatggtattccacgataagcaattatagaaagaaatgtagttccaacaaacattgcatacgcaaatattaccattggattcaaatactcttttaaatgattctcataatgtttcattgccgctttttttagtaaaacctgtgaaatcgcgctgacaagcactcctatcagaagcacacaggaatagattaataccgttttattcatttacttctccttcatcagccctggcataaattacaacaccaacaatcactaatgctgcaccaatcacttttccaacagtaattgactcatgaaaaaaaacagctccccatattattccccagacaacagttacagctttattggcaaatgccgtagttaacggaagtcgtttgataatctgctgccaacctatcgcataaaatcccaggagaaaaataataatagcataaaataaacagaatttaaagctaagaaaatcctgctgtgaagccattttactacatatgccactcatagaataaatcatcagcatcaaatgcaatgcaaaaagtacctttagtttcgacttatccatcattattcctccatgtcatccggtaaatatggatatagcgatttcaaatcttttgcactcatcaggcaataaccatatcttgtggagctatctataacttcgtgtccatctaccggcttaatatccatatcaactatatattcaggatgttcttttttgagtttttctaatatatcaacatctttctgatcaaatacaaatctaacccccgctgccgcatgatctcccaactccaagtccggttcttctcctaatgatatatcaataaccgccttcacaaaatcaattcctgttgaaagctgcaccaggttgcttccgataaaatcgccacccattctgccaccgatttcaattaaagcaattgtgccgtccttagcaatctttaactctgtatgcgatgctccatatgtgatttccagactatccaaagcatgaaagacaactttttttacctgttccagttgttcctgtgatattggtgccggttccatatgtccggtttctataaaatgtggtgcccctgtggtaaatttatgtgtcattgctaaaaagtgatgctttcctttccatgaaacacactcaatactatattcctggcctgtagcaaactcctccaccaatgcctctttctcaaatccctgagctttagcatcctcgattgcctctacaagtccagatgaatcctgtagctttgttattccgcggcttccagaacggtctataggtttaacaataatgggatagttcagttctattccttctaaatcatctattgatgacaccagaatacttttaggagaaggatctccatttttttcaaaagcagctctcatcaaatgcttatttgtagatttttcagtacatgcaatggaattagctgtaagtcccatattatttgccacataattcactgtaattactgccagatctgatgctatcgtacatattccgtcaatgccaatctctctgcatctttttaagatttcatctttctctacaatactgataggataaaaataatctgcactcttttctcccacatcgcctgctgcccaagcgaatacatgcgtctcgattcccatagattttgctttttctattaatggttcctgtaaatatgaagccccaattattgctaatttcttcatctttttatttcctccaaagctcggcaaaacgattaagttcctgctcattcttgtaatcctgcagatatcttatatatgaaaactccggtttataccctaaatctttttttgcattctcaatatccatcacaaaacttgtaaaactgcttttttcgggtttctcaacaatatttgacctatgctctttaggtgaaaacacatctactatcccttcaatctgctcacgtaatgtagttcttattcctgttcctgcattgtaagttccaccatcaacctgtgcaaacagagctttatacatcatctgacacaaatcttttatatagaggatatccttaaatgcatccggatttccccacatctcaatagtatcacctgctgtggctttatcaatcatatatctataaccaatcggttttttgacacaatctacataataatacttttccggatgatacaaatacacattaggaagtctgaacacgaaatttttcagaccatattcctgcttgtaatactccattgtatctacaatcatactttttgtaatagcataaaatgcatgatcaccggtaaacaacagttttcttggatactcaggatgaagaacatcttcttttccccaatatcctgcctgctctgcccatgtctgagtatataaagccctgtctgcattattctttcgggcatattccaaaatgcgaagtgcaccatttatgttggtctccacatatttaaatggatcatattccttcatataagcaggcaaaagtcccgctagattaacaacagcatacaaatcttctgttggcagcctctcaaaatctgatgcattacataaatccacatttatatattcaatccctgctttcttgtaataatctgtatgttttcttcctacagcaataacttcatattgctttttatctatcatattattacagtaatcggtaaaatacgctccaatatttcctgttgaaccaaatataactattttcttcataataatacctattttacttataaaattcctttaccttacttataatgtactgtacttcttcatccttaagtccataatacataggaagtctcataagtctttcactctctcttgtcgtatatttgtcttcaccattaaacctaccaaatttttttcctgccggagctgaatgtaatgggatatagtgaaatacagcctgaattccattttccttcaagaaactaatcagagctgttctctcttgcagatcctttgctttaatatagaacatatgagcattatgggtacagccttccggtatatatggaagctcaatcttccctgatttctccaactcgccaaatccgtcataatatgtattccatatattaagtctgtaattattaatcatatctgcctgcagaagctgtgcatacaaatatgccgcattcatgtcactaggtaaatatgatgaaccataatttacccatgtatacttatctatctgacctctaaagaatttacttcggtttgtacccttttctctaaggatttcagcttcttctgccttatccttatcctttattaagatggctccaccttcacccatagaataattttttgtctcatgaaaactataacagccataatcgcctatagtacctaaagcctttccatgataagtactcattattccctgagctgcgtcctcaattactataagattatgacgctttgcaatttccataatcttgtccatatcacaagacacaccggcataatgaaccggtacgatagcttttgtcttttctgtaatagcatcctctataagattagcatctatgttcatagttttcggatcaatatccacaaaaactactgttgcacctcttaatacgaacgcatccgctgtggaaacaaatgtgtatgatggcataattacctcatcgccttctttaatatcgcataaaagggcagccatctcagttgcatgtgtacatgatgttgtgagaagtgctttagctgttttcgtcttttcctcaagccatgcgttacactttttagtaaactctccatctccacaaatttttttattttcaactgcttttttgatataatccatttccgttccgataaacggtggtacgttaaaattaatcatagtattctctcctaaaaaataatataaactatacaatcatcctgcctaaaacataaaaaacaggaataacaacaaccaatgttcttaaccaatatatccatctttccgtttttattgatggtatatttaaaaaccctaatttagctctgggattatttaacaccaggataaatatacttaaaatcaccactaccgtggcaaatatctgcaataatatcgtcaacatatcatttgaaatccaacatgaaatatccattcctaaactaaagttttcttcaacaccacttgttccaaatacaaacttaaaaacatttttgtttacaacacttgaaacaaataaataaagaccactttgtattattaaaattagaaacagcgaaatagaaataattgtttccataattacattaattcgatatttttctttatcaataaccatcaatattgcaataaatgggcataccataacaacacgataatactgaaatgttgaaaatagtaacatagcaagacacgttgcaacaatataatatatcaaatatctatatttttcatcatcattttgaggtgaagttaaatatgccaaaatatatattatcaataacattccaataaataaagaaatagaattattgtacaccaccggaaaagcaccaccgaccatttcttttaaaagaacagaaatcggactaccttgtgaagctgattcactaaccattggacaagcccttgtaacaagccaatatattcctgttggaataatacctaatacgattttatatataatccttaaaactcttttttcaagcaataatataattgcaacatatggaataaagaaaaaatattttacagaaatagccataccagccaaaaaataaaaccatttattccttccatccattaaacaatacacagctgctgttgcaaatgcacatataactatatcattttgtcctccataataaacacctatatatataaatagcgatgaagctaataaaaacattgcccatttagcactatttacatcaccagttatttttttcacaatcttattcacaaaaaacattgtaatacataaacataaaacaagaaataactttccccatatatacacaagcgggttatgcagtacttcaactccaaatattgttttaattatccctataggaatattccatattgcccaaattattaaactatataatgttccttaaacataattattcggagccatattgggattttcgatagaatacctataaaaatctaatggctttccttttactgtaacatcaaacatgtttagtgtccatttaatcaaattttcagtatcgccatgtataaagaaacacaaaataataaaagaaataatgccaaccattatccattctattatcaaaggtttatcattattatatatttttttaatcccgttaattgctttttttatcattattaaattcctcataggtttcttatatttataagcattgcaatctcatttttcaattatgcaatgcttataatttaatcaacttcaaagataatataccatgtcattaattcaatgttatctatttacgataactccctgtgtcatagaatttacaaccccatccgatgttcttgcttcaacatatatccaatatgttccattttttggataccagtttgtccaattgcttttattccaatcagaaacaagtgaccaatgattatttaccacatcatactgaagccatctaaactgcacatcggaatcattagatgaatatgtaacaccaacctgatataaagatgatttatcaatcatcgcaataccatttaaatcaatataattcttgctaaagtctgttgaaactgcaaaacaaatggtttgctcatcaaatccaccatcaccatttgctgcttcaacatgaagccaataattacccggctgaggtttccatgttgcccagtttccaccattccaatctgctattcggctccacttctttgtatccagattatatgcctgccatttaaatttcacatttttatcatccgatgaatatgcagttccaacatcaatacctgttttctttacagaccatgtcataccatttagtgtcattggtgtttttgacttgtctgtaccaacattaaaacaataagtatattgatcttgtgcaccaccttgtgttattgcttctacatgcacccaataatttccaggtgttggtctccatgtaatccaattaccactgtatctatcagccagagtggtccactttttagtatcaagattataaacttgccacttaaataaaacatcaccaccactgtgattatatccaacacccaaatctattgaatgtggattaatcttccatgttgctccatttattttaacatagctttttgtataatcaatatctgacgaaaatgccgaatcatagcttgccaccgcaccattaggtgcagtaatttccacatgaatataatagctttttgcttccggtttccaggtaacagtagaatctgtggaatcagaagctaaggttacccagatttttttatccaaatcataagcttgaaccttatattttggttcaccaatattggaatcagcattaactgtaatcctgtcataatcattttcttgtgagaaatctacagattttataccaaaataggtttttgataatccataatactgtgcaatacccaatgcatcagcatgccccatcttttgcaaattatcctcatttcccataaatgatgcatctgacttattggtaacaaatgcatgctcaataattattcctggaaaaccattaagtttagatcttcttataaccccataataatccgctaatgatccatccggatatagtgtgttatcttcagaatttctaattaatattccatgattatttaatcctaacgatgtgagattatccaatattttttgtgacaaccctgccccttgcgagccaatattaccattataatttgcatttggataaaatatttttgctccacttgctccactatttcttgatgaatcacaatggaaactgacgtaagcatctgcaccaacactttttgcatactctacccttttagcgttatcatctgtagacgttgttccgggatacggacatgtagacgttgttcgcgtcatatatacctgaactccataatatgattccaattcctgtttacaatactttgctatctttagattaatatccttttctgaaataccatttgctgctgctcctgtatgagtatcatcatgtccgggatctaatacaacaacatactttccatttgatgaccttgcaagatttgaataattttcaagatctgaataattttcaacctgtatttcattttcatcaagataagcatccggcttatccttatcaaatcccatttttttcatgtcaaactttgtagcgatttcattattataaattgacaaatcaatcaattcataatcatctaaacctgaagaaacctcaaataataatcctgatgacgaaatcttgcatgaattaatagaaatattctcacctgttttagtatttttgacatttaattcagctttttccggagtatctcctgtatatccaactacaattgcctggttattttcatctagcatattagaatcatcaagtatcacatgagttattccgaaatctgactgtgcagtttctgcagttctttctgattctgtattttcaatttgtttcacctggtcaacagcttctgctgtttcagatgctgatactgtattgaaactaaatgatgttactatcatagtcgcagccagcactatagttgctgtttttttaaattgcattttattttgcctccttttttaataactgaacaactttatcattaacatgtaaaagtaaatacgaaaatacagctattacaactatacaacaggcaaataacaaataattttgccccatagttatattatctaaattgaatttttccaccattctgtaaataataaaatgatgaactataaaacatgggtaactgtatttacatattaccttgcatatcttttgaattatatcaaactgaagtaactcagaaacatatgccagacagacaaatgaagctatccctacgtatgtacactgcacaacagaaataaaatccggtttgactaatgtattaataacaacaataacaagggaaatcaaagccattttcaaatttggcttttttataaactttataaaatacattccaaaaaggaattccggaagctttacaaacagggaaacatctttagcacctaatacaattgacagaatatataagactgctgtaataatcgccaacaataacggatattcattaacgccctttctcaatatcgggaaaataatatatataataattatataccccaaaaaccactctcccaccagaaaaaaggtctgaactccccaatttgctatatatccatcaattcctaaaatagaaaaaatatatctccattttccaatgcttgtatctatacttccaatcctatagaaattaaatagcatagcaaaaatatatgctatccaaaacataggatatatgttaataaagcgttttttccaaaattttaaaacatccagctcattttcatatacatacatcaaagctgctccggatattattaaaaaaagcgatactccccagcttccaatataaacatttccaacagtcatcgtcaaaatagccttttgtggcattgggatagatgtattatatataaataacgcattataatgcgtaaatataatactaatagttgcaactgcacgtacaaagtccagatagaaaattctctctctcttcacagtttttccttacactccattctttcttttaattctttatattcatccgcaagcttttgatatttattatataattctatcatttcattagagcatttctgccaattcaataaattatattgcgcttcagatttatatttttcaataactcctgttctatcgcgatattgatttgacaacactgacaataaacctgacatttcatcaattacatcagaaaatgacaaaaaggcttcattgtatccaccttgattattttttgtcagactatctgctatctcgtcaaaatgcatatcaaccttctgcttcatgtttttatatacactttttaattgcttttgttctctctcaaaagcacatttaattccatcatgaagcatcgattcatctgaaacatactgctctgataaacccaattgatcatatagatcacgtgttttcttattgtgcacaaaatcaaaacctacaacaggattgccataacaaaatgcagtaatcgcaccatggaaactcacaccaatatataaatcgcaaaaggctaaatatgaaactatttcttccatggttaattgttctgaaggaagaataaaaatctcattactgtctttatataattttttcaaaatatcataatcgtcatttgtaacagctaaaggaaggagtaaaatcttataagttttactcagctccataagttccttcaaagcactttgatatgaattttctcctataaatctattgctatgaaatacaacatatttaccctttacctgtctttttaatttccatttaggaaacacctcttttatattaaatgccgtatccacagatactttcacatttgcattataatttattaatgcatcatatgaaaactggtttctaacgctcataaaagaaacattacctaatactttcccggcaatataattttgatacccatcaaactcaaatgggcatcccggattattccatatcacgggtattccatattttctaccaataatagaaggcactatccatgtttcaaaaataggatattccacatatttttcttcatggtttttttgtttaaaggaataaaaatgaataatctccccaccaccaaccacaattgcatcaaacttattaatcttgtggagcttttccatttctcttatagagtatactttctttgctataccaaatccttgtgtactctcatatggagaaaagaggaacaattcaacatctatttttctttttcttaaactgttttcaaatattataggaaataaatgatctccaaaattatcaatatcgaaaacacctgtaaaagctatttttatctttttcatagaagttcccttttcccaaaaatcacttaactttatattttttcttaaaattcaaattctcaaccagtaacgcatccattttttcaagtgtctcattgtacaattgagtacacttttcattgattttttctaattcttcaactctctccccatatctaggtgattgctcataccaatttctatattttttcaactcattatccaaattagtagcatgagcaagaatagaatcaatataaacctttttatcctgaatctcatttttcaattcctgaatcattgtagattgttgttgaatttgaatttgtaaactattattatcaatttcctgtgcaacaacaccattattgtttctcggtctgctaccatacatataagtcataaaggtatgctttttcttacagacacgtgccacacttacataatgttctatcgttgtcaaaacatcaatcctattttttgtaatttgtgaatcaagccactcttcaaactcttttacaggtgaaatcgacatataggtttctctgtcttctttattttcaatagcaatatctattttttttaatacatcttcgggtattataataaccttatgatctattaattctaccgaaaaattcgcctgatattctgctgaaagaataaacaatatatgctccttttcacaattaagcaattctttcattttgtctccataaataggattgcccatattatctacttcaaaaaaaacatatccatccataataaaatccttcctgcttaattataatttgttttttaacttgttacaaactcgtgttatcttttgaaaaactgtccttgacctgcgacttatcttatgattatctaaatcactgattcttctcactccatgaccttctatcgtcacttttgaaacatgatacttaccacctaacgaaactatcacctgtggatccggaataacaaatacaatatgatttcctaaatctattccatttgttgttacatcttctatagaatattttttctcaatatcattttcacacgtaactgttacaacaacatcattaattgttacattagcattttcacctggatcccaacgaatttcacgaatagcattatccatttttttaatatcaaattcatactcaaacttatcattatcttttgatttatttgatgcatctaccttatatttttcattataaacaccatcattattcaaataaaggctgctattcttaagccctgcctctaatgcattgccacaattgccatatccgaactcactgtgaagtccatttatcacgtcttcaaacttaccggcccccgggccttcatgaaatacaacattattcattgtcctaagcatgtagtttaaatttgtaatctctatatctgcacatttatcagataaagcccatgccggataataaccttcctgttgaacaacataactatatattctttcaattgcatgcaataatgttccatcaattgcatttggttcaggtggaaaatcttcatattcccagtctctgtcaaaaagtaatttcatagcccttggtctaaaccaaaacatagttcctaaaggtgcaataggttctttcttttcatcaataggcactgtaattccaagctcttttgccagattttttgtattttcaaaattcatgccccattctaatcctaatgttatataataatcaccatgattaggtggtggtggcataagcattccaagtctcgggttttcttcaaatgtttctatagcatttaatactacattttttgaccccagcatattctcaaaacatttatacgaaaatccataaccaatagtttcaggctttagctgtgtcaccttcttatcatgcataaaacatacataatcataattcattataaatttctttgtagcaactaaaagagcactaacatccctgcccctgttttgaataactatcacctgaacattattatttaattgtttaaatgcctgttcaactatttctttatttttttcacaaggaacagtaatatatatatctgcactttcaggcatcatagaagcataatgaagacaatactccgttaaatcctcaaaataacaatgcattacaagagcaatttttcttgctttgataattccggcatcaatattcgaagacttacttgaaagtatataatttaattgcatatttttctttatatcagcctgattttccaaccttaaaatgttctgccatatcatatccacatcataatctgtattttggtcgatataattataagcctccagagctgactgtccaaaagtatcacttataatgttatcataactttgcataaatgatctacgcttaaaaaacggacatctttttttctctatcatctctcttgtggcacataaaatagggtgattattatattcctcacccatatctgcatatacatcccacttaaatcccatttcagaaaatcgctttgtaaacattgcctcatgtttacctactgcatcacgataatcatttatctctcccattttattccaataattttgaaattgtttactcttaatcattgagtttcttaccgcaataaaatgagattggatatgttcaggaatatatccaacctttattgttccaaaaggatctccgttttcatatttatgaaattttgtcactccccaaaaatctaaatcttttgcatccatacattcgaacatttcattcaaaggatacaccggtcccattatagtaaagttcatcattatcatttcatcgaactttacaagcttttcccaaccatattgatctattgctgttttgtatgcccatacatcaaagcctttattttctctctcaatgacattatttgtaatggatagcagcttatctttagatttattctcaagtgttccattaacaactgcaactatttccgatgcattttgcctcaatgcatttaacatatatataatatagtcatccacaatgccatctttatcatatataaaataaattataagtcttttcacatcatttttatttaaaaccataaatcctccatctctctaaagatgtgtatacaaatcgcaaacagtatctacatcatcttctatcagcatttttcctttatttataaggacagccctgtcacatattcttctaacctgttcagtgctatgtgatacaagaagtaaggttgttccgctattcagcatatcaccaattctcttttcacattttttttgaaacgcaaaatctccaaccgccaatatctcatctacaattagtatatcaggagtatatatagtagctattgaaaaacctaatctggtagtcataccagatgaaaaattcttaacgggaacatctacaaaatccttcagctccgcgaaatcaataatctcatcaaatctttcttttaacatttcttgtggatatcccaatattgctccattcaaaaaaatattctctcttgctgtaagctctgggtcaaatccagctccaagttcaatcataggagctaccgtaccatttactttgacagtacccattgtcggagtcagaacacccgctatagttttaagcattgtgctttttccacagccattctttccaaccagaccaactgcttcacccttcttcacattaaaactaatatcttttaatgcccaaaaactatcctttgatatttctcttttaacctttttaatgaaatattccttaatactactaacattttcggaataaaggcaaaattctaatgatacatttttcacttcgattgcgtaatcttccataagtcaccctatatttttaaaataaacgtattttgttttttactgaatatcaatgctcctagtaaaagaacaataacactagtcagtaggcacctcaaatttaatgctaaagacggaacctgacagtataatataacatctctgatcatttcaacatatgctgtaagaggattaagatttactatttttgctacccattccggcaacattgacacagggtagaaaataggtgtcaaatacatccacgctactataataaccccatataaatgttgaacatctctaaaagccgtcactaaaacacataaaatcattcccattccatatgcaaacatccatgtgtaaataaccggaactattaccagtaaaaatgtccatgaaacctgagatcttgttatcacaataacaataattaacgcaataaacgatgttaagaggttcacaagactagtacatacacttgacattggtaacaggtatttgggaatataaactttttttattaatgccccattccaaataatagaattcatagctgaattgcttgcttcattataaaaattaaaaactaactgtccgcacatcaaatataccggaaaattttcaattccagccctaaataagtgcgaaaataccacagtcataacaagcatcattccaagcggattcaaaacagaccataatattccaagcacagaacgtctatatttagttttaaaatctctttttacaaattgttgtaataatggaagatatttcttaaaattttccaatgatttgttcatatttctgttctctttatttactcattattttatttatctttgttgcatcaccccatacggccggtgaatcatatggtctatcaggaaatgcaccatattcaagcttaatagaatatccttttttcttaataaagccctctatttcttcacctaatgctaccggcttacccgaacagcagtttattataccatcaatctctttctgacaagccacggctgcaatctggtcagctaatctatcaacggtaataaagtcatatttattctttcctgtagtaaacggaaaagtttttttgccttctgcatctgcttttgctatttttgagaatattgaacttcctctcaaatcatctccataaatatagtatgccctgacccactgccagcatgcgccattagcatctgccaaaagcttggaaatatctctgagggcatttttcgcgataccataatatgagctaggatgtgtaggtgtattttcatctatagcaccttcccaataaccaacctcatgcattgatcccattgtaataatctgtttaaggcctccctccagcatattctttatgaacgcataatgcttaggcagatcgacaatatgtgcctctgaattgtgcacgaacccatctctccatgccatgtgaatacacacatccgggcaaccactttcttcaaagatattcggattgtcaaatattggtgcagttaccttattaacccgctcatccattccttcgaatcttacatctgccgcataaacgtcacagcctttgtttaataaagcctcaacaacatgctttccaatatatccatttgctcccgtaactaatactttcattgttttctccttttatttactatcagtattcgtaatcgagtataaatctctgtaaaacattacaattatatacttatatatctcattttgcaacatttctgtaacaatctaatttattgattatatttttctgcctcaatttcatcaattatatcaaaatgttcatgtgtctcgcgtattctacagtcaccatacattaatgtcaaattcgggttataaaacggatcgccctcatcaagttcttttttccatctatccctgaaccgtgatatttcacgtttaaaccgctcatgcttttcaggtgtttcctccaaccccctgctttttgattcataatgatacaattctacacccgggtgaattattacatcatagcctgattttctaacctttaaacacaaatcaatatcattaagcgccaccttaaaaccttcatcaaaaccttcgacctgttcaaataccgaccttttaatcatcagacaggcaccggtaacagcacttacattttgaacagcctgaagttttccaaaatatcccacttcatttctatccgacaaagtaagaatatgccctgcaaagccacctactccgattactacaccacaatgctgtacactatcatccggatacaatagctttgcccctacaattcctgtcttttgtagctgacaatatccaaccattttttccagccatttttccgtaattacctctgtgtcattattaagaaaaagtatatattcaccggttgcatactgcacgccaaaattattcactttcgaataattaaactctccatcaaaatacactacccttactttatctgtctttttttgaatttcattataatattgaaaggtttcaccttcagtgctattattttcgacaattattatctcataattattgtatgtcgatttatttaatatcgaatctatacatttatttaacgtatctttttgatccttattacaaattataatagaaatctttggattattttgaactacaaaatcagttctaaacatgacaaatattcctgtatcctctatctttgcttccaatccaagtcttttataatgttcttctactgcttttcttcctgcagctatagcatatttcttacttgccggatttcccgctgtagagccttcatgagctctccaatgatataaaattttaggcacatgtcctatatattccgtctgttcacagcatcgtaaaattaaatcccagtcctgtgcaccatcaaactccgttctaaaaccgccgaccttatcaagtattgtttttctaacgaggaaaatatgacaaatataatttatactacgtaaaaaatttatattaaaatcaggtttaaatcgtggtgacaaatattttgttccgtttttattagttaaatcctcatctgtatatacaatatccaattttctattcttattgagtaaactcactatttcaaatagagcatctttttccagaacatcatcatgatcagccaacataataaattcacctgatgccatattcaatgctgtattagtatttcctgcaattcccagatttttattcaaacgtttatattttattcttgaatcactcaaataatgttctcttaaatatttttccacatcatctgttttgcttccatcagccagacataactcccatttctgatatgattgtccgactatagaatccatgatatcttttaaaaattctcttttggtattatacagtggaatagttatactaatttcaggttcatattcaaatttataattcgcctgttccaaaattaatttatcagaaactctttgttccaaaaaccatttattataatctgtatccggtgataaatgttttaattttctaataaatcctttaactccatacttatttaaataattaacaccttttttccaattttctttatttaatgctttgctaactataaccgttatattcatttttactcctaaccaaaaaaatcatccccacacagcctgtcccagccgtctcatggtcccggtcttatacatatcgttttccttataaaaccgttgtctcacgcgtctggatttaccttccagtgccgcataccttgctgccaggctatcatcgggcagattatatgtctttgcaaattctctcgcctgaagccgcccaagcctcatgctctcctgtatctgtttcttctgccagacacgacgcacaatatatgaaagcttatttatcccaagtgctcccaaactgttgtctccatgctgtctgtacagtattgtaggctcatctatgaatgctgtttttccaaactgtgcggcaacaagtgctgcccaccagtcatgcattattgtgttgtctatatcagtaatgcgaagcattatatctcttaaagccctgtttaccatcattgtacagcctgtcacagaattctgcaatataaactgattgattgtgcgcttgtggcagtcaagactctggtattcgctcatcgtgtccgctattgtattcagctcactatctaccacgcatagctccgtgtacaccagacatggaagtccggatttaagctctttaccatctgttttttcaatagccagcatcttatcataggtcagctctatcttcttttccagccatacatcgtcctgatcgcaggtcatatagtatggcgcttccacctgactaaacagatagaagaagttgtactttgctccacctgttgatttgccgtctatcagatgtatcttatcagggtatttttccacatagctttctacagcagctatcgtgttgtccgtagagccatcatcgtgtatatatagttcccagtccttgcaggtctgcgacaggatagagtctatctgctgacatatatatttttctccattgtatgtagccatgagaatggctatcttgtctgtgctatgcattattcctcttccactttcttccggccctgttgccaagaaactttgctgcgctgtcaaatatgcagtgcactgctgcccatatcttaaactgctttaagagctgtttttctatgaaaagcaccatcctgataccctcacctgtggtaccatcacactttatctcatccttgtaggtctccataaagaccgctacgtcaaagttgcgcttgtactgctgcttaaatgtatagttgtgtgagtgatacacctgcgctgtggcacaataacctatcttgtatcctgccttaagcgcccttgctgccataagcatatcctcatttgtgagcagcgggctttcaaagcctcctatgtcttcaaagaaatcacgtctgtaggctgagcatacatccgagaagaaatatgcctttatcccaagttttggtatatcagcttcacttctgacaaagctctccgcaggataattaaattttctcactaatacctcgtcaggctttgcatcctttctggggagctgtctggctgatatcatgacgacatcttcgttttcaaagcctctcagcatattttccacatagtgttcatccgaaggcagtgcatcctgtgacagaaacatcactatatcaccctttgacatggctacggcatagtttcttgtgccaccatggtcaaactcactccttttgacctttagtgtcctaaagcctgcctgctctgccatacgcactgtggcatcctcggattctgagtctatcactattatctcatcgggcttacggttctgtctgcccagtatatctatcagaccgggcatatactctgctgcgttgagagtaggtattatgagacttatttttatactatttaaatccagtttcttcatcatatttctcacatatgttctgattattgtgccccatcctttctgattacagagaaaacggttctgaaaagtatctttatatccagccaaagtgagcagtgctccacatagtacatctccatcctctggcgctctccgctctcataggtggcattgtttctggcatatgcctgccagtaacctgtcagtcccggctttacgctcagaagctttgcgatgtcactaccgtatatctcggtttccttctccacgattggacgcggtcccactattgaaagctcacccttaagtatgtttattagctgtggcagctcatcaaggctggtctttcgcagaaagcctcctattttggtgattcgcggatcgttgtctatcttgaattcctttacatactgctcaagctgttcaggtgtcaatatcttttccagatcacctgcgttcgtcttcatgctcctgaacttgtatacagatattttctttcccttatatccaattctggtatgtccatagaacacgctaccaccatcactcagctttacacatattcctaaaactataaaaacaggactcagaacaataagcgcaagagccgataaaacaatatcagccagccttttaagcatcttataaattacaaatgacggtctctcttgtttttctaaaacaaccgacctatatcgtaatggttttctctcattaagtataacatcaagcatcttcatctcatcatgcgccaatgcattagatgaaaactttgcctttggaatagacttgcaaaacggacagataattctaaatacaatccttatatcaagtcccaaagtacagtttagtatatactctctgtcaaattcgctttgttcctcctcacttagcctctcaccattatctgcgtatgcctgccaaaaaccaaaaacacctggttttacactaagactctttctatgatagtcggaataatccaaaaattcaggcaatgaaggagccggatttccaactatactcatatctccccacaagacattccatgtcgatggcaaattttccaatttagtctttttgagaatccatccaaccggagtatatcgaggatccactccttttttcccctccataatccatttatcacatcttgacacagcatccatatacattgttctgaatttatgataataaaaacgtcggccattcttacctacccgtacaatcgtaatgataaccggtcccaaatctcctgtgacgagttttcctataaaagcaaagatccataccgggataataagtaaactgccaaacagtccaaaaatcaggtcaaatcctttttttgctaacagataacgaagtctgtatgttttattcttccatgtgacaacagcatatcttccaagaaaatctaatcttctctccccgattttcatctcatattcgttcacattcaaatataccgtttttcccatatcattgacagcagtcacaaaagctttttgatcgaacacatatccattaggtaaatgcacaaataccgagtcaatctccgctgttgcgagaacctccatcagattatccccatttgcaacaatttcaatcttgtctataatctggccggttctatcacaatcaactatcgcaatattcgagattctgaaatcccagtttctcgtagtctttataatctttattacattttccacctgatcagatgtggtaaccagcattattttttcattagctccggacctatgatattccttcgtaacaagtctcttgaatatctgtctgactataactgtcgcaatcggactaattataaaagtaataagcatttgcacacgagagtaatattcccccatctttgcaaaataaatgcatccggaggtcaatactatgatataagcatacatctttccaacagcatatatttcctgaaacagcttacgattgactatattgtcgtttctgaaagccacaaaatatactactacgtataccgcaaactccagcaaaaacagagtaaggtaatgctctgttctgtttatcagacctgttctaaagaaaccgaatttaatcctattggcaatcagatatgaggtaaacataaccatcacatccaaaaacacttctatatatcttacgatacttttcttcgaattcatatattcatatctcctaatgctaaataacgcaacccgaaatgtattttaccatatttgatatataattgccaaattttaaaaaattataacaaaaatttaataaaagctacagtttatgtgtctccgctcaactgtagcctttaaaaacaaaattaataatttttttaaaatttaaatgtatttttgagtgtctcccacttctgatccttatcactcaggttgattggtgtgccatcctcaagtgtgtatccgcttccgtcagcgcttcccggatactctccgacaagctgtggccactcgatgccgattgcaggatcattccatgcaaggccgctctcatctccaaggtgccagaaatctgttaccttgtagcagaactctgctacatctgagagtactaaaaatccgtgtgcaaagccttccgggataaggaactgcttcttgttctcctctgtgagctctactccgaaccacttgccgtatgtctttgaatcgcttcttaagtctacagccacatcaaatactgagccttttactgcacgcacaagttttgcctgtgggtattccttctggaaatgtagtccgcggagcactccctttgtggagcatgactgattatcctgtacgaacactctgtcaatgccggcttcctgcatatcctttgaattgtatgtctccataaagtatccacggttgtctccatgcactgtaggctcgatgatgcaaagtccttcgattccacctacatttttctgtactttaatctgtcccatgatttctatgtcctttcttgtattacgtgaacatcccaacatctaactcaacctcgctacttcgtagcttctgtgcttcttagttcactaaaattctatctcctgcagatatctgtgcagcgcatcctgccatgtagggagtggcttaaatccattctccacgagcttgctcttgtccagtctgctgttaaacggacgtgctgcctttgacacaccatactctgctgtagtaacaggtactactgtgagtctgtcctcagaatactctgtatgaccaagctccactgcctgcttaaagatttcctttgtaaaatcataccagcttatatatccgccctcgtttgtagcgtgatagtaaccgtatttatcagtctctatcatatctacgagcaatcttgaaaggtcgagtgtatatgtcggtgtaccaatctggtcacttactactgtaagcttatcgtgtgtcttgccggcatttagcattgtcttgatgaagttcttgccgtttacaccaaatacccatgctatacgcactataaagtacttctcaagtgtatttgccactgcaagctctccgtcaagctttgtctgtccatatacattgagtggtgcatagtccttgcagtcaggctgccatggtgtggtgccctgtccgtcaaatacataatctgtgctgatatataccatcttggcatctatcttcttgcaggcatctgcaatattctgtgtgccgtctgcgttgattgcatgcacctttgcttttttatcatcatcctcggccagatctacagctgtccatgctgcacagtgtattacaacatcgggtttaagcgcccctatcacctgctctaccgctgttctgtcagtaatatccagagatacatatggcatgcgtgtcactgctgtaccatcagagataccattatattctgatgcaatatctgttcctattccttcgtaaccgcgcgccgcaagatcattcattatatcatgaccaagctgccccgcaactcctgtaacaaatactttcatttttgtctccttaacgctgttattcgtaaacaggctcaacatatatacgcaatcacatattctttaggcatgcacaaaagcctcaaagagtagcagttatctattcgcatacatcttctcgtagtaattctggtactctccgctgatgattgtctcccaccactcacggttgtcaaggtaccatttgattgtcttcttgatgccgtcctcaaacttggtctctggaagccatccgagctcattgtggatctttgttgggtcgattgcgtaacgcatatcatggcccttacggtctcctacgaatgtgataaggctctccggcttattgagctccttacagataatctttacgatttcaaggtttgtcttctcattgtgtccacctacgttgtaaacctctcctacacgtccgttgtggatgataaggtcgattgccttgcagtgatcctctacatagagccagtcacgcacgttctcgcctgttccgtataccgggagtggcttatcattaagtgcatttgcaatcataagtgggataagcttctccgggaaatggtatggtccgtagttgtttgagcaacggctgattgttacaggaagtccatatgtgcggtggtaggcaagcacgagtaaatctgctgctgcctttgatgatgaatacgggcttgatgtatggattggtgtatcctcatggaagaaaaggtcagggcggtcaagtggcagatctccgtatacctcatctgttgatacctggtgatatcttttaataccatacttgcggcatgcgtccataagtactgatgttccgatgatatttgtatcaaggaatacctgtgggttttcgattgaacggtcaacgtgtgactctgctgcgaagtttacaaccatatcaggatgctcttcctcaaataatttgtatacggcgtcacggtctgtgatgctctcctttacgaaacggaagtttggattgtccattacaggctcaagtgttgagagatttcctgcatatgtgagacagtctaagcatacgatacggtaatccggatatttgttaagcatgtgaaatacgaagttacttccgataaatcctgctccacctgttacgataattgtcattttgatttcctccttaatataactgctcgcggtattttccatcaagtacgtcctttaagtactgtccgtactggttcttctttacgagctcatatgtctttaatacttcatcctttgtaatccagccgtttaagtaagctatttcctcaagacatgctatcttacggtgctgatgtgtctcaactgtcttgacaaagtttgtggcatctacaaggctctcatgtgttcctgtatcaagccatgtgaagccctgtcctaaaagctctacattgagggcttttttctcaagatagattctgttaagatctgttatctcaagctcgcctctggctgatggcttaaggttctttgcgtactctactacattgttgtcgtagaaataaagacctgtaacacaataattgctctttggatgctccggcttttcctcgattgaaatagcctttccctctttatcgaactctacgataccgaatctctcagggtcatctacatagtagccgaatactgtggcgcccttgccgctctctgcgttttcaactgcggccttgagtctcttgttgagtccgtgtcctgcgaagatgttgtctccgagaaccatggctactgtatcatcaccgatgaatttctcaccgataacaaatgcctgtgcaagtccgtccgggctaggctgtacctcgtaggtgaggttgacaccaaactgatgtccatctcctaagagctccttgaatcttggtgtatcctgtggtgttgaaatgatcagaatatctctgatacctgcattcataagcactgacataggatagtagatcattggcttgtcataaattggaagtaactgctttgatgttaccattgtgagtgggtaaagacgtgtgcctgaacctcccgctaatataatacctttcatgttgttctccttcaaactgaaactacgtgctgcacttgatgctttcggtctatagaatacactgacctgattcatcatttacctgcattataaaaggtgccccaagggcaccttcaagtacttttttatatttttagcatttttcacaaaatatatgcttataatatcctgtttttgaatcattttcgtgcaataaatacacctgcatcctttgtgatatggaaccctccctctgtcttctttctgacaaatgccgcaaattccttatagcggtccacaatatacctgttctggttgccgtggcacgagagcacatactctatcacaggctctgctttttctaccacaagctcatcctcgtatccatgccagcttacctcaccaaagtattttccaagtattgcctcaccattttctttaccaaattgctcatacagcctttccgctgacagctctatacggtcatcaaactgctgtaccaggtcgtttatttccttcatatgccgtgagctgtatgtactgcacacaaacacgccaccaggctttagcacccttaggatttcactgcacacggcatccagattttcacaatagaacagtacatggtctgctatcacgcagtcatacgttgcatccggcttatacagcctgtgagcatccatcacctcatatgtgaagcgcttgtcatctgcgcctacatttctcgtcgcatcccttaccatgccatacgatatatcagtcagggttatctgcatatctgcaggtatcctgtctatgttctgtgtccagagagaagcatcaccacagcccacctcaaacaccttttccccctcaaaaaagctacactcatcaaatacccagctaaaccagctcaccggattcatcgagaaatccctgtgcagattgattctggctgatatatttgaagcatccctgtactgctgctttagcttttgctccatctcgtttatattaaccagctccagcatatgactccagtccacgcttcgcccctcgtctattacctctgaagcctcctgcagtgctgatttcataagcttcatctgctctatcctctcctccacgagaccaagctgcatgtgaagcgactcagacatgacatcgctgtccgtgtttctgagtgtcatctccttgatatcatccagggaaaagcccagatatttgaggaacagtatctgctgtagacgcgcaaagtcgtcatcattatagaatctggctccgttttcgtttacgtaggatggttttaaaatattgtgctcgtcatagtacctaacggtcttttttgtaatatgcgctttttttgcaaattctcctgaggagtagtagccgggtagtttcatattctctaattgcctccttgatagcccatatactctatgatataatcattgggtagtcgaaaaaagctcgggtgttaattctgataaatccctctagttttacagaagggggatgatgttactatgaatacaattgaagtacttacattgttactagtagtttttgcagcattgtcgtatatagacaaccacaaaaagaaatagcaccccaaccgcctaaagtgagggtgctaatctttatactaatcaatcactgagggcaaatcggaataacatccgattacctttgagtagattatacaatagagtggttgataaatcaatcactcttttaaaaatctatctaaattaatttggagaatacaatgaaatacgattatttagtagtaggttccggtctctacggagccatctttgctcacgaagcaaaagccaaaggcaaatctgtgcttgttgtggacaaacgtcctaacatagcaggaaatgtttacaccgagaagcaggagggcatcaatgtacacatgtacggagcccacatattccacaccaatgataagagggtctggaactacatcacacagtttgctgagttcaaccgcttcacaaacagccctgtagccaactacaagggtgagctttactcaatgccatttaacatgtacaccttcaacaagatgtggggtgtggtgacaccggaggaggcggctgcaaagattgaggagcagaaaaaggaaatcaccggtgagccaaaaaatctcgaggagcaggctatatcacttgttggccgtgatatctatgagaagctcgtgaagggctatactgagaagcagtggggtcgtgactgtaaggaacttccggctttcatcataaagcgtcttcctgttagacttacctttgacaacaattacttcaacgctctttatcagggtattccaatcggtggctacaccaagatggttgaaaatctgctcgacggcattgaggtcagattgaataccgactaccttgagcacaaggctgagcttgatgctcttgctgacaaggtggtatacacaggtccgattgacgcatactttggctttaagctaggtactttggaataccgctcagtgcgctttgagaatgagaccctcgatattcctaacttccagggcaatgccgctgtcaactatactgaccgtgagactccatggacacgtatcatcgagcacaagtggttcgagttcggcaaggatgaggatggcaatgatctgccaaagactattatcagccgtgagtactcttctgagtggaaggcaggcgatgagccttactaccctgtaaacgatgagaaaaacggacagctctatgccaagtataaggagcttgccgataatgagaccggtgttatattcggcggtcgtctcggcgagtacaagtactatgatatggatactaccattgcttctgtacttgatatgtgtgagaaggagcttggctaataatttagcttcccacaaaaggctttgtttatgtcatattcaaaagcgccatggcaatttaccatggcgcttttatttacaatttttttccggccagatttatctcagccgcaggaatatgctccctcaggcactcatatccatactccttcgaatatgcatatatagccggaagctgtcttgacaaaaagagtaccggtgcttctgtcacagagtatgcgccacagtgcccgaactcaagaacatcaccaagttcaagcttcttaagcttcacctcgcgtaccagcacatctgccactgtacagaggcttccgcagagtgtatagtctatgtccggcagttctgtgaattccacaccggcagctctatatatactaatcggcggcacctgcattgccatcctctgcccgaagtaattcagatggtggattcctccatccagaatcgcataattggcatcacctgtcgattttaagtcctttacctgtgtgtaatatttaccgcatgaggccgctaggaatcgtcccatctcaatgccaagcggatattcctcggcaaattctctaagcacctctgctacctcatcaagtgattgtttttccttttcctgccagtcttcctcaaaatactccacgcaaagtcccgggccatactctacaagctgtggctcaaagccgtatttttcttttaatacgctcaatgcagactttattttttccaagtccttatttattttgcgaagactcttctgtgtgccggaatagtagtggatgcccattaccgcaatgcccttaaactcatccggatgcgacatgatgtattcaatatcatcaagcgacatgccaaactggttgccacttgtcaggcgcaatatgacatgtgttttcgtttcggcaaactcggcttcatgcgcaccttccagcatacgttcaagcatcacttctgatatcagagctgcatgtcttatgctctcacaggtgagtataccggcgccatatgaaactgctcgctctatatcgcatttttccttcatcacacctgaatagatgatgctctccggcttcacgccaagtgctatacatatctcaagctctcccgggctgcacacctccacatggtctaagccctccggcagcctgtgaagcagaaacggatttgcctttatcgaaaagcaaagcggtatcctacgtcctcctttacaatcaagagcagcccttatcatggctgctctcttcgcaaactcgtccgtatcaaatacatagtacggtgtctgtctcatatgctttattcctccacaagctctttcacaagcttctcgattgcatcaactgagttgaaattctcaggaaccagatcctttggtctgattgtgatgtcaaattcatcagtcagctccgatacgagtgaaactatatcaaatgactcaagaattttgtcatcgatgagctttgtctccttctcaaaatccacatccggtcttaattcctctaaaatctctaaaattgtgtctctcattttacatttcctccagttttttcatatcatattttccgtttggaagcttaggaagctgctccagtttcttgattttccttggcaccataaagcccgggagctcgtccctcagtgccagcgcaaggcttctcctgtcacagtctcctgtgtagaaaagtatcagcacctcttttgctttattatatataacgcagctttctgcgactccatcgaccacattggcggcatgctccacctcatcaagctccacacggtgtcccatgtgctttatctggcggtccatacgtccacagaaatgaagtatgccgtcctcatcgagccttccgtaatcccctgtgcggtacatccgctcaggataagccctgttgagtggattgagtgtaaatgccgcagctgtcctctccggatcattataatagcccagcgccaggattggtccacatacgcatatctcgccctgttctccgacagccggctcatttccatgctcatctatcagaaaaaccctgtaattgtcataggcttttcctataggaagcacctcgtcctcttccaccagatgatccacactataatacgtacacgaagcagttgcctctgtcggcccatactggttcacaaaatgcgcttccggcagattttcctgccattttctgagcaccctgcatggcattactgagcctgagaagcagatttttctgagactcttaagccctacttcctcaaatgctccaagcgatgtgagaatggtaaatgccgaaacactccagccgacactgctgaccttcttatcattcatgtaatcaaacagggcatttggctccataaaatactcttttggaataatcgctgtgctgcagccggtctttagcggcagataaatgtccctgattgccgcaatatagtcaagcggcgactgattgcccagcacatcactttcctctatatgcatcacatcacagtaagcattgatgtatgtcataagtgacagatgtgatgtcatgactccctttggattgccggtggagcctgacgtgtagataatatacaatgggtctgtcatggacatctgcctgcggactgttgcgagcatatcgttctcactatccgtcacagagtctcctgctgattcactgattttacaattactatcagcgcacgccacctgctcgaagctcgatatatcctcagcaataaatatctgcggtctatcgaagccttctgcctttgccagctcatccactatgctctccacatgctcacgactttccctgtccgcaacaatagcccttggacacagattttcaagtattttttcaattctcttgtcaggaagcgatgcatcaatcggcgcatacggtctgcctgcatataccactcccaggaagtatgccggtgttaccattttccttccggcaaatactgcaacaggggttctgtccactccaagctgttctatcagatatgctcctgtatttcttgctatatcatacacctgcgcaaacgtaatgctgcattcagtatccgaaaatgcaggcttgtcagggtatttttctactgtggcctcaagccactccagtacatttttcatcttagtcctctttcatgcattaataaacgttgccgaaaaaattatagcatataacatccgaaaaaaatgtcatgtgctatcgaattaagaattcttaagaaagccttaatttttttctgtagatttttctatatttgattctcctattaaatatatcggtctgtcctttgcctcgagatatagcttcgacagataaagtcccaaaatgcctatgctaagcagttgtatcccacctataaaaagtatgataacaacggtcgaagcccagccggctaccggatctccgaatacaagtctcctgataatgataaagagcattgcaattattgcgacaataaagctgaacactccggctattgaagccatgtatagcggcgcgttggaaaatgccactattccgtcaaggctatacaaaaagagctgccagaatgaccactttgtctcacctgccactctgtttacattctcaaactcaagccacttcaccttaaagcctacccagccaaacaatccctttgaaaacctgttgtattccttaagcgaaagcagtgcatccacgtatttcctgttcatcagcctgtagtcacgtgccccatcaaccatatttgcctttgatattctgctcatgagcctatagaactttctggcaaaaaaagatctaatcgctggttcacctttgcgtgtcactcgccttgtaccgacagcatcataaccttcttccataagagccttgtacatctcaggcagcatatccggcggatcttgaaggtcagcatccattatcgccacatattcccccacagcatgctgcaagcctgcatacatggctgcctccttgccaaaattgcgtgaaaaggatatgtatttcacaccggaatcatttacagcaagctcctttgcgacatcgagcgtcccgtccatagaaccgtcatccactataatcagttcataggacaatcccgctgtctcactctcttgactcatctgattaaacacctgagttattttattataaaaaagaggcagagcctctttctcgttaaagcatggtaccacaatgcttatcttatttttttccatataagccaccctgcatataatatcaaataactaaaaaatccgattgctgctcctgccgtatttgtcacaaaatcatcaagctgacaatatcccctgccggtaaccagctgcgtgtactcaattgctgcgcttataagagcaccaacaggtattgtaaaccatctcatccaatttttaaaaaccagtggaaataaaagcccaaatggtataaacaatactatattttctataaaataagcgtgcatctgaagtgtcatgccccaattgctccacagcaccatatcggcaacgccggttctgcttcccggctcccttgaataatacactatcattataagcgtatacatataggccacaaaggtgccgcagaacagcatatgccagattttgcccactatcttttttcttctctcatctgcctgtgatacctctctcattgtgaaaagatatctcagaagacacacaaaaatatacatcgcaatgcagattaaagccaaatataccgctgacggaagatatttgaacttttcctgtatgtctcttattatataatcctttaaactcaatgtccttttttatgctccttgtaggcacgaatgaactccagctgtcgttcatcgtcctttttctgttcgtcatcagacatatgactcactttaataattatacacaatattatgccaattacaataataccggcacataatataaaaataattaagatttcaggcatagactatttcctccggcagaatttaattactattctctctacagattaaattatatccacttaatttatcttaattcactcatttatgaaccctgataacagcaaaagctgcatgatattctcacacagcttttgtatattacgtgtattatctttggcattaacctttattttaattttgcaacgaccatatccacatatttctggcagatttcctcgctctctgcctcaatcatgacacggataacaggctctgtacctgactcacgcacaagtatacgtcccgtatcacccagctctgcagtaacttgttcgatggctgcctgaacatcagggtttgcaagtgcctccgccttgtcagccacatgcacattctgaagcacctgtggatagatattaagtccctcacagagctggctcatcttctgttttttcgccatcatgacctccatcatcttaaggctggtaaggataccgtcgcctgttgatgcatacttagagaaaatgatatgtcctgactgctctccgccgatgcggcagccgttctgctgcatgtactcgtatacatatttatcacctactgcagtctttgcgtagccgattccaagctcatcaagagccttatagagtccaaagtttgacataactgttgtgacaacagtattgttatcgagctttcctctctctttcatgtactttccatagatgtagaggatatggtctcctgtgattacattgcccagttcgtctacacagagacatctgtctgcatctccatcgtatgcgaagcctacatcaagaccattgtccaccacgtacttctgtaagccctcgatatgtgtagagcctgcattattgttgatgtttaaaccatttggctcattgttgatgacatagcactttgctccgagtgcctcaaaaatagactttgccatgttccatgaacttccgttggcacaatcaagacctaccttcacgcccttgaacgagtagacaccaagcgatatgaggtatcccatgtaacggttacggcctgctacatagtcaactgtgcatccgatagcatccttatgtgcatagggcaattccttccactcctgaccaaacaggcggagcttgccatctatatagtcctcgacaaggagaattgtctcctcatccatcttctctccattgctgttgataagcttgattccattgtcatagtatggattatggcttgccgaaatcatgataccacagtcaaaatcatcggttcttgctacatatgccactgatggagttgtggtaacgtgtaatagatatgcatctgctcccgatgctgtaagtcctgatacaagggaatactcaaacatgtagcttgaacgtcttgtatcctttcctattactatcttcgccggctcgtcgagctgcttctgcttcttaagctctccataataccagcctaaaaatctaccaatctgatatgcatgctctgctgttaaattgacattagcctctccacggaagccgtctgttccaaagtattttcccattattgtccccttgtgaaataaatttttcttatattatacacttaacaaatatgtttgtgtagtaaaacagtattatttgttaaattattcgacttcataaaatcaattgtttattaatgtgataaaattgacatattatgtaaatcaaagctacatagatatcttatgacactccatatagtatctcttctcattcgcttctccaattgagaatgtctttctgggcagcaccccgcccgcatttattgcagggaacaatgtgctcttgtctatcgactgaagaaaaattccacatcccttagtctccttaaccagtccgtgaagtgcctcatcaccatggatatagtctatttccacattgccatgtgtctcaagatacttatctaaaataccctggagtatctcaaccgggaggcggtcacctctatttgtgatattaattccggaattctttattgcggtagcgcctgattcaacatactcaaatactatctcatcaccctcagtgctcgcaagtccttgttttgtgatttcagcttcgaaaaacgacagtatatcctttacatcaacatttgtaagcagtctgtgaataggcttaaactcaagcgcctcactgtgcagattacagatttccacaagagcatgccttgcaggatggtttttcaactgctcctctgtgaattttccggtttttttgatattttcccagcaggtcttcgctgttgcaagggaatggtttccatcacctactgcaaacaaaaagcctccacagctattctgttttgctgcgaatgcctctgtcacctgctttgctgcctcaccctcgacagcatagccgcggatatgtccgcctccctgcatgagctctgtatcgtaaagcttacgaagagtgtccctgatggcatacacatactcgattattccatgctttacagctgctatatttactgcatcttcctgtgtagcaccctggcatccatcaatcttttgtctgtctataggatcatcaacaagcagcataacatgtggcagctcaatagctgcattctctcttatttttactctcggaggtatacgtgagattactgttccctctgttgctctgatgagagtcttctttttcgggtcgaaatcatagtcatccagatcaataagtcctactattccaagacgaacccctgactccgtagtacgctcaactagcacatagccatctgccaccgcttgctttaaggttccatctgtgagatatgtctccatagtggtattaatatatttgattctctcatcatccgtcattgaagcatattttgtttttctgccggtttctttgtcatttttgacaccatcccctgacgaattgcaatcattctcctgtttcgtaattgttcccagatatatttcgggaaataccacattaagcgttgatggtgcatcagccacatgcttttccacagcatcccaataatcagcctgacttgtgaactggtcacaggcaataactgaccatttttccatatctatacaatcgtttggcaaaagaatatttgccggattgaaacaatttgacatatcaacaattctcctttaaatatacaaaatatataacagaaatccgctatactctatagtataacggatttacttttatttgcatatattaaattccttttgttgttagaattcttcccactgcatcatctaatttttctgccggtatctcgccactgttaactgcagacaacactgcattataactgctctcaaagcctgttgaaacataaagcatgctcattcctgccttaacagctgccacagccgcctcatcctgtgtacataccttattaagagatgcatctgataaatcatctgtaatcaaaaggccattaaagcccatggtagttctcatatagtttacggcacctgctgatgtagagcatggcgtggtttcctctcctgtcacactctggcaaatcacatttcccatcatgactgccggaacacctgcttcaattgccttttgatatggcacaaaatcagatgcctcaagatcctcaagcttgtctgtcatccagagcattcctgtcgctgaatctgtagtagcctttccttttcccggaaagctctttgctacagaattgattcctgcaccattatagctgcttacctgtgctgcaacacagtcacctacagtcgctgactcgctgccaaatgcatatgtatcgttatctgcattatcaccatatgctatatccgctgtcggtccaaaattcatattaaggccattggtagccatatatgagcctatctttcctgcactgctgcccgctgcgtcagcatctccaagctgtgatggtgcctgctgtgcctcatatccattagctgaagcaagaggaagtctttctccaccttcttcatcaattgcaagaaacaaattcacgcctagtcgctcctgcgaaaatgactgcagactgctcatcatctttataactgcagcctctcctgagaaattctcctgtctgaaaacaaaaccaccaagaggatatgtaccaatagctgcctttgtcttgttaccggcctgagtgaactgtgatacacctgtaatctcctcaggtctcgtaatgaatagctgggctaccttttcctctgttgtcatagaagacagctttgtcttgacagaatctgacggagtaaatgccggtgctgcctgctgtccatcagcttgtacctgctgaattccatccgtctcctgagtaggattctgtgtctcctgctggctttctgttattttcttattcgccttattccccggcatcacaaaatgcactgctccaaataccagcacaactatcagtgcaattacttctattatgatgaggtacttatctccattttgtctgaagttcatatttaatccccaaaatttgtatttgttaaatcgttattaggcccgcttacttttcctgataatgcactgctgtattcgtttacagttgcactaggagtatagcctgtatcaccttcaaggaactgatgcactcctgtagccatgtctgcaagtgtagtaggcacctcaacccatgcaccatcaacctttccaccatagaacacctgtggatatgctgtagaatcctctactgtatagtctgcaagatttttaaatactgaaagaatctcatcagtattatagttagtattgacatgtccaatcagatctgataccatcttaatctttgccgctgtattcatctgcttagctgattcaaaaaccttgaacagcactgttctctgtctttcagcacgcttatagtctcctccggctgtataacgtattctggaatacgcaactgcctgagttccatcaagtgtatatgtgccggctgaatcaatatgggatgagcttgttccacgaaccttattgacctcatcaatatatccgtttatcacctttgcctcagatgcatcaatatcctgtacaatgcctcctacctcatctacaatctcaccgactgtattgaaattgactgtaacataattctttatgtctaaatccagatttttgttaagtgtatctactgcaagctccggtccgccaaacgcatgtgcatgtgtcaccttctggtatccatgaccatcaatattcatcatacagtctctgaaaatagataccatgcggattttcttagcatcatgatcaaccctgactaccataatggaatcggaacgtgttcctttatcaagctgatctgagcggctgtcaacaccaaataacgcaaactcctcaatacctgatttgtctgtagtgctgtcatcctcagtctgagtatcggcttttgtcttaactgcctctgtacccggctttatgcctttaacttctttattcttaacattactgctgttaacctttacaagtattatcgctataatagcaataagtacaatcattactgccgtaataattatatttttcttttttttcatctgcactattctccgtcattcatatgtgtctgcgcctgctacttttcgtcatcgtccctgccatagtaattaccatagtaattaccataatagtttccatagtaatgaccatacttagactcctcaaacctgcacttattgagcacagctccaagaatcttgactcctgagtcctcaagtgtacgctttgtattgatgattgcacggctgcttgtaacattctgggcagcaactattactgctccgtctacattctttccaactacggctgcatcaatcgcagcgcctgtaggaggtgtgtcaacaagcacgtaatcaaaatttttctctccaaactcgataagctctttaaactcttttgtttcaagaagctctgtcggattaggcacctcatgacctgcaaagaggataaacactcctttgatgtttgtcgcatatactactttgtccaaagatacctgacctgagagataatgtgagagtccgtatatctttccaccgctctccactttcgctctgagtcttcctacaaggactgacttacgcatatcggtatctactataaggactgacttcttagagtccgccatcgaacgggccagatccataactacggttgtctttccctcatttggcacgctgctggtaaaaaggatagacttcacaccctttccactaaagctgatgcttgttttaagagctcgaagagactccttcattgtataactctggtcttttatctgattaataactactgtttccattaaactgccctcttcttattcttgctatcgtctgatttagatgattgagttttcttcttttttcttctctttgtcttggctccatcatactctgtctcatcaacaggaagtgatgcaagcaccttgaggcctgttctggtctccatatcatctgcattagaaattgtatcgtcaagcatatatccaagtacaactatgccggcagcaagaatcagtccgagtacagctcctataactgtattcttaaggatattattattcaccggtgtctttgaagcatatgctgtctggataatctttggctgtgactgttccatattgtcagcgatatactgtgatgaaacctttgcaatctcatctgccactgtttttgaagcttctaaatcagtgtctgtaaccacaatcttgagcacacgtgtatctgtcggattctctattgaaaccctcttgctaagctgctcgtatgtctcgtccatatccagattgtcgattacctgtgataaaactgtcctgcctgtgataacgtactcatagtcgtttgtcagactcgagcctacctgaatatcagcaagactggtgatagatgttgacttggtcagtacatacatctctgcagatgcctcatactccggtacaaaagtaatcttggagtataatccaaatactgctgcaagaagcaccattgatgccacaagtgccttccagtgcttcactaattcgtgaaacagcgctactaaatcgatttcaatttcctgatctcttattggttcgttgttttccattttcctaccctttacaaattgtaacattatttttcggtttaatcctatgttatattactacacttcatttcttttgtctatttttagaagtcacaaaaaaagtattaagaatatgtcatattttgtaaataattatgcaatataatagaaaagtgccgtttccggcacttttctattatattttcatttgctatattttattttttcctgttctattgcggctgctctagttctgctttggctgttctgatggttcagtcggtgccaccggctgtggttgtggttttgaatttactgtaacggttattgaactgcttgcgctattccagcctgccatttcacctgctatagctgtaatctgtacgctaccagccctgtaaatggtcacatttccggcgccatctactgacgcaatcgaaggatcacttgactggtaagaaagcgctgctccgtttgaagcacttgctccgagagaaaatggtgcatctccctctgttacagttttattaccgcaacctattgtcacagatggtgtctggtttggctgtggctttgcatttacagtgattgtaattgtcttgctgccggccttatagcttgtagtagcctcagacttgacagtgattgttgcagttccgacacctgctatcgtcacattaccgttctcatccactctcactacaccattattatcacttgagtatgtgagctttgcattatcctctgctgtcacaccgagattgaatgctccgtcgccctctgtcacattataagagtcagctccgccaagactctgtgctttgccggccaccttgtcaacaccaccatatacaattactttttcatctaatgttacattctcatatagcttctttgcagctgaataaggcatatttatgcagccatggctgccgctgtacaggtagatatttccaccgaaagtacttctccacgaagcatcatggaagccaattccaccattgaatggtataaagaaattaacccatgacttatatccgtctccccttaagtatctatccttatctcttgagaaaatagaatacactccggtaggtgttccgtgtccttttgaaatacatcctgtaacacactgacttgatacaacaagctctccatttttgtatacatataccatctggttggtaagatccacttcacagtaattgccaccatatgtgacatattcacctgtttcttcttcctttgcctcactgtaaactgcttccactgttgcagactttttattgtttattgcctcagcaatcgcctcatacagcttgtttccatctacagtctgtcctgatgatgctacaggcacatttattatacttccgcctgttgtcttaaactgtcctgttttcttctttgacacatcatgctttttggctagctctgtacaatatgtagccatattctcgccatcaagcgaaactgacaatccgtcattgtccactataagccactgggctatctgatcctttcctacagcctctgtagcagcttcacctgttgccggtgtgaaattacatgtcaccgtcacatcaagatatgcattggcttcttttaatgcattctttacctgctcgctgtccgtagccttttctccatcaacatatcctgttgcagatgtaagctctaccttatccttcagctcctttacagcgcttgtcagatttgcagctgcattgtcatatacaggtgcatctcccgatacaccgtcaacaccctcaaattgtcctgcatctgcattgtaggctattgtagcgcgatatggcacaattgatcttatatcaaaggtctgtgtgtctgtcgcagccttcttttgttcgtcatcatttgcatctgtatccttatcactctgagccgcagcatcagactgtgactgcgtttttgcagtgatataagagtctacaagagccgtctccagctcatcagacttgtccattttaaaaagcttcacctgcttttccggttccttatccttattggccgcatttatcagttcctgaagatctgctttgtcattgtacttgagtcccaaatcctcagctgtcatatcaaatgatgcatcgtcaagcttcactgatatcttatacttgcctacagcggtctttatggctttctttgcctcgtcagcagtcattccacctacatcaactgatgcaagcttgtacttttcagggaatgtcttgtatgctttctttccacagcctgccatgcccaatgccataagcacacaggccaaaactaccaggagttttatacttttcttcttcatctttgtcctctttatcttaattttatattattctcacagcaccatattttatcactttcttatatatgcctcaagtgagatttgtcacatatttttatctcaatttaccattttattcatcataatgcagataaaggtctggatttatccagacccttaaatcaattgtttcttaaacttgctataaaaccatgctacgattggaaaagctttaaaatcagtttttctaatgagccatatctgcttcctgctgcacgcccggtacactcccgggtgctcctcacgcagcatctcgtcaaacttcttcatatgctcaacgttccttgtatcattgccctttgcaagaaatatctggtactcatcatcgactgcctcggctatgccgcgctcaaggtactgcttcttgtaggtctgcagattgccgtgcacgttgttgtactcaaacagtgcatcaagcaccttaaggtgctggtcatgacgcttgatcatcatctttatgtccacgctctggccactccttccaagtctgtactgatacagcggcagtggtgaaaacgtgatgcttgtgcagtatggtatagggtagagtatatactcctggtcctcgtagaagcagtgctcatccacacgaatatcattcttctgcaatacatcagtacggatggtcatggaatgtatagtgatcagcggatccatgactgcctcagcaaagccccactccctgttgtagtgataagagttggacactgcctttctgcgctttgtgaccttctttgtcctatcatccaccaggttgaagtcattggatatgacatccgagtgcgtgtgcttcaaaagctgtacaaattgtggcaaaaggctcttgtccagccagtcatcaccatccaccaccttgaaatactttcctgttgcacgcggtatcgcatagttgatggtagatccatggcctccgttctccttggagagcaccttgaagctgtatggatatttctgctcgtaggtatgtgccaggctggctgtggaatctgtggaaccatcatccactatgagtatctccagacttctgagcacagacaaatctataaacgagtcaagacagttctttatatacttttcaacattgtaagccggaacgactatggttaaaagcttctccatatatgtttctccatgtatacctgtttccttgtgtactactactctccgagtccatccttgatgtactgtataaggtgttcaagcgcctcactctcatcctcgccattgcagataagctctatctcatcgcctgactttatgcatgctccaagcactgaaagtacactctttgcattagctacatttttctcgtcatatataaatgttacctttgatttaaatttcattgcctctttgcagagattgccggccggacgtaaatgtaatccggtaggattcttgattattattttttgtgctaccacttttattacctctttttggttatatatctatcaatgtgatgaactgtcagagccgttatttccggtgtttcctgacgatgtgctgcccgatgacgatgaaccgcctgtgccggtatcgcctgttgttgagcccgaggctgttcctgtaccatcagttcccgttgtgccgcctccgtcaccttcccttccgataactatctgaacctttatctcgccccatgtgtacttggtctcatccagatttggctttaccgtcactgtatgtgtacctgtaccaaggcctgtcacatcaattttacccttcagtgtagttcccgaaagtgtatctatatcagacttggtgccgcttactatgacactgctcttatctgttacaaatgtaagcgtatatccctcttccagtccgtcatatgtgatattggaactgttcagcgtcatggttgaagtcgcatttgtttcaatctttatatctatactgagctttgccttggatgagttcactataaaaactccatccggcagatatcctgtcaggtcaacagatgtacttatatcgtctgttgcgcccgatatatcaattggtcccacatctatagatgtgatattgttcaatgcttctgcattacctttgagcattacagactcctctgatagttctactccgagcacgctctttcctcctgccggtgagcctgtcgtagtacacttgataggcacctccttggtacttaggacatcaactgtcactgctatagactgatactggctgtccacatcaagctttgatatatctatctcatcgccattatcatcaatcagagtgagatcaccgcgatcagttatctgattatctgatattatggtattgtcatcgacctttatatttacattggccgatgctatagttgaaacaatggactcaggacctccgatctttactacctttggatttgcctgtggcttgtttcccagtgctttcgcacctgagagacttccatccaatgatacctttacctcaaactgcttctgcatatatttttcaaccgaaagcgggagcatatggtctccaccgttgaaggtaatcgaatgtctgtacttggtgcatccaatatcaacctttacgcttgccttattcgtatcatccttatctactatgatatttgcaaggtcgacatttgcgtaaaaatcagaatcatcaagctcgttcagatagcttctcttgcctgataccgaaaagctgatggtcttttccgaatccttgatggtaggccatagccccttgtcaacaaccgaatcacggcctgtgacggtgactgttgtggtaaatgtctttgtcttgaccgggtcattgagattgtagaccacaagccagagtataaatgcaaatgctatcgcaagtattttaaagcctatattatttgtgaaggtttttagaagcttctttcccattcttaaacctccttttaattaattcaaatttacccggctccctatgtctgttctgcagaagcttaagctgtgtgcgtagatgatcggcatctatatcgtgctcaatctgccccttgtatgctgtagaaactgatcctgtctcctctgaaactatgatagtaagcgaatcacttacctcgctgactccgaccgctgcacggtgtctggttcccaaatccttcgagagtgacaggctgtctgatagcggaaggtaacatgtagctgacaccacacggttgccacgcacgataaccgctccgtcatgaagcggtgtgtttttctcaaaaatattgatgaggagctgacttgtaagtatggcatccacatctattcctgttcggatatactctcccagatttatctcatcctccatgactattagcgctcctgtctttactctgcccatcgcaaagcatgcacgcaccagctcatcgattgtcttgtcggagaatttctcaatctcgcccctgccggtattgaagaaatcacccaaaaaggtctttccaccaatattctccaaggcatttcgaagctcaggctgaaaaataacgacaagtgccacgagacctatattaaagagtttctcagcaagccacagtatcgtatccatctggaacaatgctgcaacaagcacaaacaacagtatgataataaggcccttgaacagattccatgccctcgtggtctttatccacaaaagtatatgatagaagagcactgaaataataagtatctctataatgtctatcacaccgattttgatgcccggcacatttgtgaatgtaaggaactggtccttgaagcgtatcaatacaccactcacattatccatagcgccctcctttctcttatactatgtaactatttgtcatcctcaaatatattttcgtctatttcgagatcttttgcaatagcctctttgctgatattttcctgattatgtctcggaatcttctttccaaggcttcctgtattgccaaagtgctttacaaccttttcctccttggcaatcatcttctttggaactgccttgacgtaatagtaatattcatcatcctcaaattgtacgttttctgtacgtgcatagtcaagattcataaatataaactgtatgacaacacctgcaaaaatagcaactacagtgctgagcacaagccagattatcttctccggcagtccgagcaccagataagcaacaacaagtgcaaccaactgtatgagccctcctgctatggtagcaacagtccatgaattgttgattttcaatcgtctgacctgatacaccaccagtgtggtgataacaaagattgccataactataaacatctctttgttgtcaagaagctgtcccattgtcacattgagctttgtagtgctctgcccctttttatctaccacctctgcaagcgctgatgcattctgtctgattccgtcaaagaaatagtacaacagtgtgccacatattattgcaacaaccgaataagctcttcttaaaagacctgctgcaaccggcataacagatggtatgtgaagctgaaagcatataggtgtgagtatcacaagcatgccatccttcggtgcaaaacggaaatagacaaaatacagtactaaaaaaagtacaaatgtgatagcaaaaacctctatggacagcgcatacatatctaaaagtatcataatcgaagcaatccagagtattgcattcaccggaagcagtgcacacacaagcgctaaaagcagtgccacaagcatcgagcttattttcgccatatatccgatattcaaatctattgttataaatgcgataaatgcaacggcaaatctcacaaccggaagtataaagtgctcatactcaccgcaaaatttgactgccttatccttaatttccagtaacttgttcataaagcctccctaacgcttaatcttttcctcacgggaatatattctgcccactgccttcaggtgatttgcgtatttgcgcacttctcttctgccggccttatatcttgcagtatacaccacaattgtgacaaaaatgtaaaccgccataaatgcaatatacagtatgcctattgtgacacctattgccttaaaatcaagcttattgattctgtccaaaagctctgctgcattgacagcaacccacatcacaacaagccctgcaaatgcgaatgtacctgtaaagaagctttttaagccctctttccatatatagtcccatccgtaatagcttgcggactgcttctgcacacggctgtcatcgcttttgctgtcacatagagcaatattaaacagttcccttactttttcttcgtttatcataaatcatcctcttacctgttacttgatatatctcatacggtttttgtcatcctgctgccacagctgcctatcctggctctttggtgtgtcaagggcactgcgtagtgtgtttgtgagcttagtcttgcactcatcacaaaatctacctgtacgtatcatcctgccacagttctcgcatggtataccatatgatgaatccggtgaaaacgaaagcctttcctcacgtatccacctatttatctgcttcatggatgtatccgtctccttggccactgtctcaaccggcacatttggattatcctcaacaaatctctttactatatcaaatttctcatccatttttttctggcagttcgggcagtactgctcatctgacagtacattaaatattctgccacagcccttgcaattagatattctcatctgataaaaccctcctaacttccctgtcctatgcaaatacacagcacatatacacggccgggacatttctttgctatctcgtgcccaatcgactccgccgtactgcctgtagtatatatatcatctactattagtatttggtcatattgtacaatactatccgccacttgaaaagccccctcgagacaatttctgcgttcaacataccccattgtcttgagtggactggtatttttcactctgcgcacaagcccttttgccatccttatgcctgttttttcagacaatgcctttgcaaaacactctgcctgattgtagcctctctggcgcatttttttacggtgcatcggcaccggaataataacatctatcccacagcttagtatccagtccgaatatctttccactgctgtctgtgcaaaataagccgcatactcacgtctgtttgaatacttgaacctgtacatggtctgctttatgctgcccttgtatgcaaaaagcgccttgccctgcctgtagctgtcatcctcccgcatctgcctgtgatgctcgagtgcccgtgcgcagtcgtcacaatactctcttcgctcagacaaaaccggcttcccgcagcgcatacactgtggctgctcaaccggaaagagcttttcacagcatctgctgtgtatatatctctcaaccggaccaattataccatcacataccggacagcgcggtggaaataccagattgattacgcctctcccaatatcctttattttgttcactaatccccctgactgtaatatccccatttgtaacattattaacaaaaaagcgacaatacattcctgcaatgcagggacatatcatcgccctcacggctgcctgttataaaacgtatattctagaattcttcatctctcttgcctgcaaggaactctacatactttcctgtaccgatagcaacacatgtcataggctgctctgcagtcattgtattgatgccggtcttttcctcgataagctcctcaagacctctgagcagcgaaccgcctcctgtaagcacgattcctctgtctgcgacatcggctgcaagctccggtggagtcttttcaagcactgagtgcactgcctcaactatctgaagagttgcctcacgaagtgcttcctctgtctcctctgagctgactgtaatagtccttggaagtcctgttacaaggtttcttcctcttacctcaattgtctccggctgtgggagagggtagcatgtaccaatcttgattttgatatcctcagctgttctctctccgatgagaaggttatgcttctttctcatgtatctgacaattgcctcatcaaaatcatctccggctatcttgatagatgtgctgactaccgaaccaccgagtgagataactgctatatctgatgtaccgcctccgatatctactatcatatttccgcatggctttgaaatatcaatacctgcaccgattgcagctgcgattggctcctcgataatcttaacatctctggctcctgctgcaaatgtagcatcctcaacggccttcttctcaacctctgtaacaccacttggcacacatacgctcacgagcggctttctgaagcttttcttaccaagcgccttctggatgaagtgcttgatcatcttctctgtaactgtataatctgagataacaccctgacgcagcggtctgactgcaacgatattacccggtgtccttccgagcatgaggcgtgcttcctctccgattgccttaatcttgttggtgtccctgtcaaaggctactactgaaggctcctttaacacaacaccctttccttttatataaacaagtatacttgctgttcctaaatcgattccgatatctgatccgaccattttaatagcccctttcctgccatatctttaaatttacacatacactctcttattatatacaataaatcccatttttcaaactttttttttgaaaaaggtcatatttaataaaattttaaagtttatccttgtctttttccagatatggtttcaaaaaccggcctgtatatgactgttttacctcgcatatctcctcaggtgtgccctgcgctatgacggttccgccgccgtctccgccctcaggtcccatatctattatatagtcagctgtctttatcacgtcgaggttgtgctcgataacaactacagtattgcctccgtctgagagcctgcgcagtatctccacaagcttgtgtacatctgcaaagtgcagtcctgtggtaggctcatcaagtatatatatggtctttccggtgctctttctgctaagctctgtggcaagcttgatacgctgtgcctcaccacccgaaagctctgtggacggctgtcccagcttcacgtaggatagtccgacatcatagagcgactggattttgttctggatctttggcacatttttgaaaaactcaagtgcctcctccactgtcatatcaagaacatcgtatatgctcttgcccttgtactttacatcgagtgtctccctgttatatcgtttgcctccacagacctcacacggcacatatacatcaggcaggaaatgcatctctatcttaaggattccatcgccgccgcaggcctcacaccgaccgccctttacattgaaactgaaacggccctttttatagccctttgccttggcatcgggtgttgatgcaaacaggtctcttatcatgtcaaacacacctgtatatgtggcaggattagagcggggtgtacggcctatcggtgactggtcgatgtctatgaccttatcaagctgttcaagaccatctataccatcgtggtcacctgcgatacacctggctctgtttaaggatttggccagatgcttgtagagtatctcattggtcaatgagctctttcccgagcccgacacgcctgtaacacaggtcatgataccaagaggtatctgcacatcaatatttttcaggttattctccctggctcctcttatcgtgatatatccgcttggcttgcgcctctcctgtggcaccggtatctttattttaccgctcagatatgctcctgtgagtgattttttgcactttataatgtcctttaatgagcctgctgccactatctccccgccgtgtgaaccggctcccggtcctacatccacgatataatccgctgcacgcatggtatcctcatcatgctccacaactatgagcgtatttcccagattcttaagattcataagtgcaccaagcagcttgtcgttgtccctctgatgcagtccgatacttggctcatcaagtatatatgccacaccgacaagccctgatccaatctgcgtggcaagcctgattcgctgggcttccccgcctgaaaggcttgccgtgccacgggtaagggtgaggtaatcaaggccgacctgctgcaaaaagccaaccctcgcacggatttcctttagtatctggtctcctatatagtgctgttgctctgtaagctctatatcagcaaggaacttcacaagctccttcacagacattgaggtcatctcatatatattcttgtccgcaactgtaacggcaagtgacgacggcttaagcctctgccccttacagctcgtacacggagtaatgcgcataaactgctcatactctgcctttgccgtatcagaaaaggtctccttgtatcggcgctcaacattgtccacaaggccattccatacaaggtcatagacgccttcgcctctctgacccttgtatctgaccttgagcactctgccgtctccaccgtaaaaaagcagttttttcatatctgcagataaatcatcaatcggtgtgtcgagaggaagcccatagccctcatgcagcgcacgaagtgtcgcataggtatagctctttgggtctgtacatgactgccagcccatcacttgtatggcgccctctgatattgaaagcgatgagtcaggcaccataagctgcgggtcaaactccatcttgtagccgagtccgtagcaggtcgggcatgctccgaacggattgttgaaggagaagcttctcggctcaacctcatctatgcttatgccacagtcagggcacgcaaaattctgggaaaaggtcatctgttcgccatccacaatatcaactattgccttgccctctgtcagttcaaatacattttcaagtgaatcagtaagcctcttctctatgcccggctttacaaccaaacggtctacaacaatatcaatattgtgctttatatttttctccatcggaatatcctcggagagctcatacatgctgccatctacaatcacacgcacgtatccgctctttttggctctctcgaacagcttctggtgctcacccttgcggcctctgaccaccggtgcaagaagctggatacgggtgcgctcaggcagcgccataacagtatccaccatctggtctatcgtctgctttgtaatggcacgcccgcacttcggacagtgtggtattccaattctggcataaagcagtctgaagtaatcatatatctctgtgaccgttccgacagttgaacgtgggttcttgttggtggatttctggtcaatggaaatggcaggcggaagtccctctatagactccacattcggcttctccatctgtcctaaaaactgacgcgcatacgatgaaagtgactccatgtaccttcgctgcccctcagcatatatggtatcaaatgccagtgatgacttgccggagcctgaaagtcctgtaaaaacaacaaactcatctctcgggatgtcgagactgacgcactttagattgtgttcgctggcacctcgtattttgatgtattttctttctttttttgccataatttgtgttcctccaaattgcttccggatgttataagcttttattttacgtctctcaatgtgtttttaagcataataagcttatccctgtactcagcagccgcctcgaaattgagctctgccgccgcttttttcatctttttctctatatctgcaatatgcttctcaagctcttttttgctcattgactccggatctttgtcaagagcattctcatcggccgctaccttctttgagatagctatgagatcacgcacggatttctgtatagtctgtggcgtaatgccgtgagcctcattgtactcttcctgtacctttctacgacgctttgtctcgtcaattgcgacacgcatggagtcggtaatcttgtccgcgtacatgatgacatgtccctcgctgttacgcgcggcacgtcctatcgtctggatgagcgaggtctctgaacgaaggaagccttccttatccgcatcgagtatggcaacaagtgtaatctccgggatatcaagaccctccctgagcagattgatgccgacgagcacgtcaaatacgtcaagacgcaggtcacgtattatctccgctctctcaagtgtatctatatctgaatgcaggtactttaccctgatgccaagctcggccatatagtttgtgagatcctcagccatacgctttgtgagtgtggtgataagcaccttgtgatggtttgcagtctccttattgacctctgacacaaggtcatcaatctgtccctcaacaggacgcactgatatctcaggatccaaaagtcctgtcggtctgataatctgctccgcacgtagcagctcatgctcattctcatacttattcggagtggctgagacaaagagcatctggtctattttaccctcgaactcctcgaaattgagaggtctgttgtcaagggccgagggcagtctgaagccataatcaacaagagtggtctttctggagcggtcacccgcatacataccgcctatctgtggaatcgtgatatgtgactcatccacgattatgagaaaatcatccgggaagaaatctatgagtgtcataggaggctcccccggctttgcaaagttcagatgcctcgtatagttctcaattcctgagcagaagcctgtctccctcatcatctctatgtcaaaattggtcctctctgctattcgctgagcctctatgagcttgtcctcgcctttaaaatacttcacacgctcatcaagctctttctctatattgaggcaggcctcatttatcttctcctgcgaaactacatagtgggatgcagggaaaatcatcgtgtgctcaagcgagcactttacctcgccggtcagcacatcaacctccactatccgatctatctcatcaccgaaaaactcaaccctgattgccgtatcatcggcatttgccggaaatatatcaagcacatcaccgtgcactctgaaggtgcctcggtgaaaatccatatcattcctggtgtactgtaaatctatgagagccctcgcgagatcatccctgtccctctcctgccccgggcgcagcgaaatactcatgcctgtccactcatcaggacttccaagtccgtatatgcaggaaaccgatgccacgacaatgacgtcctttcgctctgtgagcgctgccgtggctgaaagcctgagcttatctatctcatcatttacagaggaatccttggctatgtacgtatcagactgcggcacatatgcctcaggctggtaatagtcgtagtaggaaacaaagtactctactgcattttcggggaaaaactccttcatctcaccatagagctgccccgccagtgtcttattgtgcgatatgataagtgtaggcttattgagtgctgcaatgacattagccatggtaaaggtcttgcccgaacctgtaactccaagtaaggtttcaaactggttgccctccttaaagccctttacaagctgctctattgcctgtggctggtcgccggtcggcttgtattttgaatgcagtttaaattccataacgcacgcttcctccaaaaaaatcttaaatactgcttttgtaaaattataaaaagacaaagtcaatcatttatagtatgcacttacgcgctttattttactacaaaaaatcgactttgtccacaattttagaacattcgttcttgcttatttattttatgttactgttcacacctaacagtgtgaccagcaacgattacagccatttaaaatttacttcacgcgtccacagcactgcttatatttcttgccactgccacatggacatgggtcattcggatataccttggctgctgcacggcgctttggtgcattctgtgctgactcatccttgtttgtgcccgaaatctttgcaacctgctctcgctcaaccttctgctcaacctgtacatgatacagcagtctgacagtatcctcctggatagccgaaatcatgtcgtcaaacatatcaaagcctgccatcttgtactctacgattggatctttctgtccataagcctgtaaaccgattccctgacgaagctgtgccatatcatcgatgtgatccatccactttctgtcgattacacgaagaagcacgacacgctcaatctctctgaactgctcaggctcagggaattctgtctccttctgctcataaagcatgacggccttttcctttaagtactgcttaagctgctttgcattcttgattgactcaatatcctcttttgtaatcggatcaagaggaatgaccggaagcacaagctcgttgagctctacaagatcccagtcagctctgtcaatttcctcggaaatacatctgtcaacagacttctcaacctgctcctgaaccatcttaaggatagcatcacgcatgttgtcaccgttaagcaccttcatacgctcgctgtagataatctctctctggtcattgtccacctggtcatactcgagaagatttttacgaataccaaagttgttggcctcgattttctcctgagccttctcgatagcagatgtgagcatcttatgctggatctgctcgccctccggtactccgagcgcattgaaaacgcccatcagacgctctgaaccgaaaagtctcatgaggtcatcctcaagtgagatgaagaactgtgactcaccaggatctccctgacgtcctgcacgtccacggagctgattgtctatacgtcttgactcatggcgttctgtaccgataatcttaagacctccggcagcctttgcctcatcgtcaagcttgatatcggtaccacggcctgccatgttggttgctattgtaactgcaccgtgctgtcctgcaagtgcaacaatctctgcctctttctcatggaacttggcatttaatactgtatgagggattccctctctcttgagcatgccgctcaaaagctctgatgtctcgatggtgattgtacctacaagaacaggctgtcccttttcatgtgcctctttaaccgcatccacaactgccttgaacttttcctttttggtagcgtatacagcatcctgtaaatcaatacgtgctaccggcttatttgtaggtatctcgacaacatccatgccatagatatcacggaactctttttcctctgtgagagctgtacctgtcataccggccttcttgtcaaacttgttgaagaagttctggaatgtgattgtggcaagcgtcttgctctctctcttaacctttacatgctcctttgcctcgatagcctgatgcagtccgtccgaataacgacgacccggcatgatacgtccggtaaactcatctacaataagtacctcatcgtcctttaccacatagtcctgatctttgaacatgaggttgtgcgcacgaagcgcaagtatgatattgtgctggatttcaagattctccggatctgcaaggttctcgatatggaagaactgttctacctttttcacaccatcctgtgtaaggtttacaaccttgtccttctcatttacgatgaaatcaccggtctcgtcctggacaatgcccatgatggcatccatctttgaatactcaggaacatcctcaccacgcttcatctgtgtagccaggatatcgcatgcctcgtaaagtcttgtcgacttgccactctgtcctgaaatgataagaggtgtacgtgcctcatcgataagcactgaatcgacctcatcaatgatagcatagtggagacctctctgaacaagctgttccttgtagataaccatattgtcacgcaggtaatcaaatccaagctcattgtttgtgatatatgtaatatcacagccataagcctccctgcgctcgtcattgtccatgccgccaagtaccacgccgaccttaagtcctaagaactcatgaacctgtcccatccactcagcatcacgctttgcaaggtaatcattgactgtgacaatacacacacccttgccctcaagtgcattgaggtatgcaggaagtgtagaaacaagtgtcttaccttcaccggttcgcatctctgcaatacgtccctgatgcaaaataataccaccgattatctgtactctataatgttccatgccaagcacacgcttagcagcctctcttactgtagcaaatgcctccggaagaatatcatcaagtgttgctccgtcctccagacgctttttaaactcccttgtcttatcctttaattcttcatcggaaagctttcccattgcttccttatatgactcaaccttgtcagcaatcgggtaaattctcttaagctctctctcgctgtgagaaccaaagatttttgaaaatgcgctcatatttttctcctataacttcaaattgcccttgtacaggctcacaatagtgttattgtaacactttgaggatgattgcacaacctaaagggatgaatgttttgtaaacattttataaaaatatttgtgggagtgccgagctttaatggggagacttcgcgcatgggaggctgtgaggtccggggagcacacagtatattcctcataaaaaatatgaagtcagccacggctttttgcctggacaggctgtgttttagtgatagtgcttcatgctatttgagtttatggaacgccgtggcagttcatattttttattctgaacacactgtgtacttcccggatccactttgttgtgcgcgaagcatggcagaattatttttttaattcaaaagctctccttatgggagagcttttggcgctacatgtttgcatgtatttattatgtttttaatgttatatagcttttaaatacatatatcactatataaggtttacatatggaatttcctattttattatttctgggcttcatatgcttcgcggcatgcttttgcaagctggtcaccgcaggatgtattcttaaatccacatttaattccaccgattttttcctctacctgggctactgtgagtccttcaacgagctttgggatagccttaagatttccgttgcagcctcctgtaaactttacgttatgtactacatctccatcgaggtcaagctcaatctgtgttgaacaggttccttttgttttgtaaatatatgacatattttatcctcctgtgttttcagtttttttgtgtatacatgattataacatatatttttacatctttactatgttttttcacattttccaactcagtttttcaattcagaagttactgttcacacataacagtgtgaccagcaatgattcagattcataaatcttttcctattatttatttactatttacgccataacgtaagggacgattcgcgcgggcaccgcggtgggctgcatacactccggaatccgcgaatagcgaagctgcttagatactgtcgaattatgcacatgctacacagaaatgccgaggcatggacgccgaggcaaggagaaatcgagccatggatggcgagtttcgacgttttcgtcatcctatgaaaacctacaaagcataatttgcacagtatcttggctgcgcagcgtagcggacaccggagtgtatgcagcccgccgcggtgcccgcgtgaatcgtcccgtactataatctcaataaagtaatattccctctctagaggattaccggctggatctgtcgtccggccaccacttcatttattgtgtcgacaacctgttttccatcacacacgagtgaattcggtttcttcacacagtcatcctgcccaaacggcacaaaataaatatttttcatattcatcagctttccgatattcttaaagttgatgccgagcgcatcatttgtggaaatcccgataacaagcggtctgccgtttctcagatgagcctttgccgcgagaaggaccggtgtatccactatgccgtttgcaagctttgccgctgtgttgccggtgcatggataaatcaccatcacgtcaaacagctttcccgggccgacacgctctgcctcctgcagtgtcctgatgccctcatcccctgtgatttcggagatagtatgcataaagtctcccgcctttccaaagcgtgtgttcatcatctgtgcattataggaatatacaggtgtcacatgtgtgaagctatccacaagcctctttgcaacatccttagtcttttcaaaactacagaaggagcctgtaattcccattcctacggtgcaatccgaaataaccataagccctccgtcataccttttcttttcatacagtcataaagtatttttgcaccggttttcggacagtatatgcccggaaggccgagcgcatgcgtacagtttatctgatacctcttacaggcctcaaaatcacagcctccgggcttagatgcaatgtctataattatcgcatctttttgcaaaatcatgattaaactttcatctataaccctatccggtactgtgtttatgagaaacagtgtttcgaaacaggccttggcaggatcattaaaatccaccgtttcatatcccagttcagtggcctcatgccttgcctgttttctccttgccatcaccatgacatgggctcccatagcagaaaaaacgcgggcaattgcctttccgcattttccaaacccgctcacaagtacctttgagccgtatataccatgtatgcttttttgtattgctatggacgcagtggcctcggccgtaacaatggcattctgctctatgacagtttcatctctcataaagtcacagcccctgtcaatgccgggaaagcactccggcatcatgccgccccacactgcaatattgttaattattatattatgttttaatttttctatatcactatttataagcttaagctttgaaaacggtgtaggaaacacaatattcccaacacgctcataatcaatcccgccgctatttctgcaatctgtctgttctcctcccagcatatcagcgaggtacttttgcctctgatccgtaacatatattatagtgtctttttgcataataacttcttcctttcgctataatatatgcgcattttcagcttatgtgatggtattttgttttctcgcttaaagcttcctcataaagctttttcaaagctttacctattcaaaaaaatacagagcctggcatatattccgccaagctctgtattttttataaattctacatttaatttttaaattatcctattcaattccggttgcaacggataatctctctgtagcttattacagctgtgtgacaacaaaaatatcgtagatggcttttattgccttgtcaaaatcatcattgcttacaccgatgatgatattgagttctgatgacccctgatcaatcatgcgcacattgatattggcatgtgcaagtgcagagaaaatcctgccggctgtaccacggtttgacttcatgccacggccaacaacagcgataagcgcgaggtctgactcgaggtcaatgatatcaggatgagcaagtcttctgattgagctgataacctgctgctccttgccctcaaactctgcctgatgtacgaatactgtcatagtatcgatacctgatggcatatgctctatagagataccgttctcctcaaacgcctggagagcctttctacagaagcccacctctgagttcatcttgtccttgtcgatatttaccgcaacaaagcccttctttccggcgatacctgttatggtataatcaggcttttggcatgtgctctcaacgatgagagtaccaggtgcttccgggtcgtttgtatttctgatattgattgggatgcctgcctttcttacagggaaaacagcatcctcgtggagcactgatgctcccatatatgaaagctctctgagctctctataagtaacaaccttgattggctgtggattgtcgataattctaggatcagctacgagacagcctgaaacatctgtccagttctcgtacatgctggcatgacatgcctttgacacgatggaaccagtgatatccgaaccacctcttgagaaggtgactacctttccgtcaggtcctgctccgtaaaagcccggaataacagccttttctgtctgctcaagcttctttgagagcaccttgtctgtcttttccgcgtcaaaattgccattctcatcaaaaaagatgactgttgccgaatctataaactcatatccgagatagtttgccatgatgattccgtttaagtactcaccacgagaggctgcataatctgcacctgcctttgccttgaaattctcagcgataatcttgaactcctcatcaagtgccagctttaaatgaaggccatttatgattgaatcatatctgtccttgatttttctgagcataaccttgaaatcctgatcattctcagccagatcatagcatgcataaagcatatctgttacctttgtgtctttggaatttctctttcccggtgcactcggcacaacatattttcttgactcatcgcttcttacgatgtcgccaacctttgtgaactgctctgcactggcgagcgagctgccgccaaactttactacctttaccatttgtctgtttttcctctgcttcctatataaataactgtattagccaatattataccgctttgataaatcattcgtcaatactcaatatagtcaacatccaacttcataacatcatgttctttgtcaaatgtgatgataccgtatgatggcatgcagccccacagcggtgcaccgatgcttcccggattcatcatcgcaagaccattgtgcttatcataaaacagcttgtgtgtatgaccaaagagcgccaggtctgccccgatttccttcgcatgaagctccagatgcatatatgacagctttactccgtatgtatgtccatggcacatgagtaccttatagccgtcgatatcaataagtctctctgtatctccccgtgaaaaatcacagtttcccggcacattgaccatggttatatgaggaaactctctcctaagggcatccgcatccacaacgcagtctcccagatgaagtatcatatcaggctcctctcttttgactgcccgaatcatatttcccacattaccatgtgaatcactcagtaccaaaactctcttcatgcgcttttctcctatatcttgataatatattatatatattatcataagttttccgcgtgtaaaatatttttttctttatatacgcaatatacgcaaaaaagctccatgccgacttcattgtcagccaggagctttaatctttaattttaactatgcaagcctcttccactgcttgctgcacttataataagaatagaacatacatctttctgcctgttcgcatctgaccggtgcactctcgatattgcactggcaatttacaatagcatctgcttttcccttacatgaacccttaatcattacatcgtctaaaacttcgtctgacattctctttctcctcacatttgtttgatagtatatttacctgttacaatattgatatattttattatttttctctgtacgggctatgctttacgtactattaccatcggcttaaatactaacatcttgtccgcaacagttgtgattatactatatattgtattttaaatccatatgtcatttctaacaaaacaaatgattttttatgtcacatttttcacttgacgaatttcattttcatgttcaagcccaaaaatcaaggatgtctgagtaaaacttctccaaggtatcatcatccgcattaaatatctcgtgctttgaatcaggatagaccttcttaatgccctgaggcagcttcgcaataaattcatcctcagcggtatttgaaaccagataatcctttcccgcctggcataacagcaccggtattttaatttcctgtgcatgcttctttatatatttggatgccttgcgccctgccctgcaccatctgtaggtggcgccatttgtacgatagcgttcctcctccaccttacacttgtatatgtagtcatagcgtgcctttgacaaacaacagctcgattcaaaatcatactcatccgtatactgtgtctggctcggcagatatttatcgttccagttaagcacacttgcgacaaacaatatcgcctccacggcaaaatgtgaaaaattgccataaagcatctctatcatagggcttgaaagtactgcctttgtaaatacctcaggatgcttctcaagatacagggcagctatcgcgcctcccatagagtgaccgtacaggtaaagcggtctgcgcccctcacgcttcatcacaatctcgcggataaacatatcaaggtcactcacataatcgtcaaagctgtttacagtgaccatgctcatatctgatacacttctgtccgaaaagccgtgtccgcgatgctccaccatatatacagagtatccggcctttgcgaaatagtaaatcatctcataatatttaggcatacactctgtaaatccatgtgatatgactatggcagcctttgctacaggtgtcgtcacatagccgtaatgtatgcgtgtgccatctgcactcttcatatagccatcttcaaaattaagcctgataaaaggcaaaacatatcttgttaattcctcattatatttttcttctgtaataatcatagcattcctcacttttggtatttgatattttgtaagtaactatatctcaatccggtcaataagattcaggtcatattttctgactatatcaagtgccttttcatagctttccacatcacatatattgtccactgtatgtgcatcaagcccaagtatcactttgttgccgatgtcatgcggtatacaccagaagcgctctgtcggatagtgctttcctgcactgataccaagcatgtttatctcaagcggtatgttaagctccttaagtgccttgcacatcctcgtcatctcccattcgtagacagaatcaagtccctgataatttattaaatcaggatgtgctaaatagctgtacatgcctgttttcatgccctctataacagtatccacatactcgcgtatacgactctcatcatctgtcggtgtgcctgtatacgggcctgtctgctctgatttcataaaatgctggcccattatcatgtaatcacagccaagcctgtcaaacatagccttctgctccttgaaaaactccggtatgtactccgcctcaaaaccaacgtagagctttatgtcggatgcatactccttcccaagcttcctgatggcatacacatactccggtgcctgttccatcgtcatccggatgcccgacacatagccatccttaaagggacacggcacatggtctgaaaagccaagctctgcgatacccattctgatagccgcctctatatattctcgctcactgccatatgcatgctggcacctataggtgtgcgtatggtagtttgcctttaaaaatcccgtcattacttaaagctccaaaaatctatctcttattgctgttcaaacagctattcaaatactacaattaaaatcaattttatcactttttgtactttattacaatctcatatttttgggacttttttctctatgaaatatatatgcgttatgttataatccattgatatatgatagtcataataattctatccaccacacaatcataaatgagggggcaaaataccttttgaccctcatatcattatatttttatatacggaggaaataatgttcaaaaaaggagtggttccctcccagggactgagaattatcatcgtcggatgcggcaaggtaggccgtactctcgttgagcagcttggcaaggaggggcacgacataacaattgtcgacaaaaacagggagaggatttcccaggtatccaatatctatgatgtaatgggtattgcaggaaacggtgccagctacaagatactgcaggaagcgggtattgatgatgccgacttaatcatcgcagtcacaggctctgatgagctgaatctgctatgctgtaccattgccacacaggtcggcaactgtgctgctatagccagagtcagaacgcctgaatacagccaggaggccaaatatctgcgcgacaagcttggtcttgcactcattatcaaccctgagcttgaggcagctattgagatggctcatattcttcatctgccgtccagccttgaggtaacaaactttgctcacggtcaggcacagctcatcaagtatgagattcccgagggcagcatcctcgacggaacaaagctcatggatctgggcaccagacaccatgccaacatacttatcggtgcagtcgagagagatgatgaggtcactatcccatcaggtgattttgtgctccgcaagggcgacaagctgtcatttgtcggcgaacgcagacatacaaaggaatttttcagccacatcggagtcaatacacacagcgtaaaaaatacactgattatcggaggcggcaaagccgcatattacctggcaaagcagctcatatcacgtggcataaaggtcaaaataatcgaaaatagcttcgagcgctgtgaagaactttccatactgcttccggatgctgtcatcataaacggtgacggaacagaacaggcactcttaaaggaagagggcatagagacctgccagtcatttgtacctcttaccggtatagacgaggaaaacatcatgcttacgctctatgcgaagcaggtttccaatgcaaaggtcataacaaagcttaatcgtataacttttaccaatgtcataaacagcctggaccttggcagtgtaatctcaccaaaatacatcacctcagaagccataattgcctatgtccgtgcaaagaaaaactctatgaactgcaatatagagactctctaccacatgtacgactcaagagttgaagcaattgagttctttgtatcagaaaactcaaatgtgacagacataccgcttcgagacctaaagctcaaaaagcatctgctcatctgcttcatcaaccgaaacggcaaaattattatacctacaggtaatgactgcatacaaaaaaatgatactgtcatgattataacaacccataccggctttacaaatcttcaggatattatggaatagtgggggaatgatatgaacacttcagtaattcgatatcttttgggatatattttaaagcttgaaggctttttgctgcttctgccatgtattgttgccggtatttattatgaaaaaagcggcatctactttttgattgttgcactcataagcatagctatcggttttattttttcggctaaaaaaccgagggattttaccttttacctgaaggagggctgtgcaacaaccgcactgggctgggtcgtactgagtatattcggctgtctgccgttttacatatcaggagagattccaagcttcacagatgctctttttgagaccatctccggcttcaccacgacaggagcgagcatcctgcctgaggtagaatcactctcatattgcatgaatttctggcgctgctttacgcactggattggcggtatgggtgtgcttgtttttcttctggcaatcatcccgctttcaggcggcagcaatatcaacctgatgcgcgcagaaagccccgggccttcagttggaaagctcgttccaaagatgaagcataccgccaggcttttatacataatatactttggtcttacgactatggagattattttcctgcttttcgggaaaatgcctctttacgatgccatctgtacctctcttggcacagccggaacaggaggctttggtatcaaaaacgacagcttttgcggctacaatgtttatctgcagtgggttgttaccatatttatgatacttttcggtgtcaatttcaacgcttactacctgcttttcttcggtcacatccgtgacgcacttaaggttgaggaggtcagatactatttcggcatcataatagcctccgttgtagtcataagcgtgaatatcgcgcatatgtgtaccggtgtgtttgacgcagtcacaaaggcagcgtttcaggttggctcaatcatcacgacaaccggattttccagcaccgatttcgacagatggcctgagctttcaaagacactgcttgtgcttttgatgttcattggtgcatgtgccggaagcaccggcggcggtatcaaggtatctcgtattgtcatcgctgtaaagacaatacttaaggagttaaatggctacattcacccaaagagtgtgaaaaagctcacctttgagcacaagcctgtagaccatgatgttatcaggtcaataaatgtttatttcatgacgtatgccgtcatttttgttgtttcaatgctgcttgtttccgttgaaaactatgatttcactaccaatttcacggctgtcgcagctacatttaacaatatcggaccgggtctttctctggtcggtccgacatgcaatttcggcttttttaataatttctccaaatatatactgatgtttgacatgcttgccggaagactcgagctgtttccactgctcatcctcttccatccgtcaatctggaaggaattatttattcaagcagataaaaaagtaaaagggaatagaaaggagaaacaaaatgttcgcatgtaaaaattgcggtggaaatgtgaagtttgacatcaaatcaggccagttagcctgtgaatactgtcattcacttttcgacccttacgcgtacgaggacaaaacctctgacgccgaggtccagaaggacttcgacgcaaccattttcacatgccctcagtgcggaggagaaatcttgagcacagacgataccgcagcaggcttctgcagcttctgcggtgcatcaactgtgctctacagccgcatgcaaaaggagcacaagccggcttatatcataccatttgcaaagagtaaggatgactgtaagcaggcctacatgagcctcatgaaaaaggctattttcgcgccaaaggagcttaaggatcctaagtttatcgacggattcagaggtatctacatgccttactggacatattatgtaacccagaaggctcctatttcacttccggcgaaaagatcccaccgttcaggagattacatcattacagactattacaggctcgagggagatctcgacgcctactacaagggactgtcctacgatgcatcttcatcatttgatgacagcatcagcgaaaaacttgcgccatatgatgtgaagaaaatgaagcgctttacaccggcattcttaagtggtttttacgctgatacagctgatttaccatcaacggtttacgcaagtgacgcaatggatgctgcctgcacaaacacagtaagcgaaataagtaaagagcctgcctttaccggcttgtcagtcgacagtgactccgctgctctttcgcctttaagtcttggcactactgtaaaagagacagattactcaatgtttccggtatggtttttgtcgtaccgcaataaggatcgtgtggcatatgccacagtaaacggccagaccggcaaggttgttgcagatctgcctatatctgtcggtaaattcctgctaggctcactcattgcggcaattccggtatacattttattatgtctgctgacggttctcactcccggaatgactctcaccatagtcggtgtgcttgcgattatcgcaaatatctgttactcacaggagctgaccatgattgctgtaaaggaagccggtaccgaggataagggccgcatagcaaaggaacagccggaggctcttggtgcaatcaacaaccgcagacgccttaaggctgcaaaaaaggccacgaaaaccataaagaaaaagacaaacacatcgtttgtagcttactttatactttttatatttgtcattcaatttgtccctgcgctgtttgcaatcatcgcaggcataggcagtggctttggaaatgcagacggcagtctgattttatttgttattttgaccattatatcatttattttttcaatcagagccttctcaagctttgaccggatgcccggacacaagggagttgcaggactcatctttggcatggtatccatgcttattggcgatgctgttcttttgttccagccggtgctcgatgcatggtactatggcgcagcttttatcatcatcgcctcagtgcttatcacactgattaatgtcatccgcgcattcaatgtgcttacaacgcgcaagctgccacagtttgccacacataagggaggtgatgaccgtgcatagaaataattataaaagtccttttttgcattgtataaaatgcatgtgctcagctttgtttacattatttttgcttgttacaatccttgttttgagcagctcatcaaatgtatatgccactgagacagccacaaattacaatctaagcggcacaaacaagtctaccggctacgagtacatccttgaggactctgccaatttcattgacgatgccgtaaaaggcaagctcatctcacagatgaaaaagacaaccgaatactgcaacatagctgttgtcacaactacctcacatccttacggaagcactgaaagctatgcagtcaatacatttgaaggctatttcggaaccggtgcaaacggtgtcatttttgtaatagacagagatttaaacgagatttatctggcttgtgagggaagcacgcagagaaccatcccgaactcaaaatgtaactccatctgtgacaacacttatatatatgccacctcaagtcatgattacgactatttcacctgctgcatggaaacaatagaccaggtcaacacagtccttgcaggcggacatatatcacagcctctcagatacatttcgagcatctttatcgctctcgctgccggcatgattttttgctttgtatatgcattatccctgtcaaagggccgcaaggctaagagcaacgagctcatgggtgcagcatttacaaaggtagagattcaaaatgcacgcgcacgctttatgaaccagacaagacactacagtccacaaagctcaggctcaagtggcggtcacagcggtggtggaggtcatagtggcggcagtcacagtggtggcggtcacagtggtggcggtcaccacatctaacctctgattttgataaatacaataccatcatcagccccggcaaatgccggggttgtttttgtaaaaaaaacactaaaaaaatctcaatttgtgattgtttttagtacaaatacactatataatattcgtagtattttgaattgtttttagagtagacttatttagttttggggcaaaaatgattaaacgcagatatatgagaacacgacaattgaaacccggcatgattattgatcaggtcatcaaggatcctaccggccgtaacctggtggtacagggctcagctatcgatgattatatcatctcttcgctgcttaagctcggtataatgtcagtatacatccgcgagggaagtgctgatcctgacgatccggatgccatactgtctccaaaggctgccgccatggtcaaacagctgcgtacggacgaccgttccaaggtcaccttaagcgacagtgtcaggcagcgtgtatcaaccggtgtccagtacatcttcaacaacactaactccgaggagctaacacaggcaacaaacatgattgcagactcgctcatggaggccatcaatgaaaacgatgccatagctgtcgatatcagttccctcaaaacaagcgatgagtacaccttcaagcacagtgtggatgtggctactatttcaatgattcttgccaagcagatgaagctgcctgacaacgaaatccacgacataggtgtatccggcctgctgcacgatataggtaagacaatgatccccaatgagattctaaacaagccgggcaggctcacggatgatgagtttaatatcatgaaaaaacattccgtgtacggctacaatatgctaaaagaccgaaaggatttaaacaactctatactgatgggagtgctgcagcaccacgaacgcattgacggaaccggatatccactcggctttgatgcacccaaaatctgtcagtttgcaaagattttgtctgtcgcagatgtctatgatgcgcttgtcacaaagcgtccgtacaaggatgccttatcacagcgtgatgcagttgagatgcttatgtccatgacaaaccagcttgatataggtgtcatgcgtgctttcatgagcagtatgattctatatcctgttgattcaattgtacagcttagcaatggtgaaaaggcaagagttgtaaaaaacagtgagtactacattctccgaccaactgttgtcggtgtcgattccggcagagtatacaatctgggcaatgatttgaagtgcgcaagtattattatactttagacataatgatttgagccaccttaagaataaaaaagctgatgcgtcatgcttacatgcaggcatcagctttttgttctaagtggttttatagttattaattgcttgcaaaaataaaaagccctcagcactgtgtactgagagctttttgttttagcagtccgtacgggaatcgaacccgtgtttccgccgtgagagggcggcgtcttaaccgcttgaccaacgaaccgtatattataataccatggtcaatcggataatgcaagctttttttgaaatttttttaaaaaatttttatttgttatttatctgcctttttccttctttactttctttatacgttctcttttaaagcgttccttcagactctctgtaaatgtctcgagatacctgttctccacctttggatttctgaagccctgtgctcggttaagcgcagatttctttaaagcacccattgaatcgatgacgcggtctgcactggctctgatacgttttctctttctgcgctcctcgactgcctccgcaagctcctgtgacctctcctgcgacctttcatctgccgccttcttacgctctttaacctcttccacaacctcatccatataggtgttgaaattgttctgcagattgactattgtcctactgaaatctgtaagcgctgacacggtgattgcagtgtctacagctaaaaagcccataagaagcagtgagaaaaactcataccatataggtgacatccagcctgtgatgaacttcgtaaatggtgcaatgaaatataccactataagtcctgccaccccaaagcctacagaatatggaaaacacaccctgccgtttatattaagcggcatgctgctgtaatcccaccagtatgcgtgaaacagcttctcaagcgcccacgatgtgccatattctaagacaatgcttcccaaaaatgccacaagaaatatctgccaccatgtaaatgtcgcatccgtgtgagccgaaatgaaatctgctatcgcagtgatcgcgacacctccggctccgtaaataggacaaagcggaccatagagaaagcctctgttttcccatttttttgctctgatggtacagtagatgctctcatatatccagcccatacagctaaatataataaaatacacaaaatatcttgataaccacatatataatcctttctccccggataatttatgatatacagcaaatgtcattgattcccttatgtctgcaaattaaaaatcactctccggatacatctcatctaagtatatatcataccattttgtacactcatttgtccatgagtcagcaactttttcatattgcagtcgcagcttatcgacattttcttcgttaagctcgctttctgcttcacatagctcttcataaaccttttctgcttcttcagctgccttcaccaccggctctgccgcaagtgcaagcttccactctaggtacgcctcttctgttgaaagctgtctggtctcatgcctctccctctttgggacagccgcaagtgcctcgaccatcgcagcatcctttgcctgcatgagtgccggcagattgccatcctttgatgccttaagccttgaaatataatggtcatagccaaacggatagtacatcaccttgtcattttcaaagaccaatatggcatcagccacctgctttatgaaatacctgtcatgcgatacaaagagcatggtgccggtatatgccttaaatgccgattcgagtgtctccttcgccggaatatccatgtgattggtcggctcatcgagtatcataaggttcggacggcctgtcagaagctctgcgagcacaagcctggacttctcaccacctgagagcgagctgatacgctttgaggcatttgcccctccaaacagatacatgccaagcgtctttcttaaatccttctccagaagtgccggaaaaagctcgtgaaaatgatctctcacggtcttatcgctgtctataagtgccgactgctggtcaaaatatcccaccagcagattgctgccgagctggcttgtgccctttattggtggaataagtcctgccacagtctttagaaatgttgattttcctatgccgttgtcaccaattacggcaatcttctgaccacgccttatacgaagcgacagctcaagcagtacactgccgtcgtaacctatcttaagctccttcgcctcatagacccatttaccgcccggaaactgtggctcgatattgcctgtaaaaatatgagcttcgtcttcaaccggcttttctatcagcttcatgcgtgccagcatggtcttgcgtgagcgtgcaaacgcagcttttttcggcttatgcttgaatttgtcaataagctcattattatgcgcaatctccgcctgctggcgctcgtaggctttgcgctgtatctgcagatttttaagcttctgctgcctgtactgtgtgtagttgccggcatatctgtgcaatgctccgttttcaagctcatatacaccagtcgcaacagcatcaagaaacgccctgtcatgggacacaatgacaacagcctttggatagtttatcagataatcctccagccactcgacagttttcatatcaagatgattcgtcggctcatcaagaagcagcaaatccggcttttcaagtaagagctttataagtgaaatcttggtctgttcacctccagaaaaactgccgagtgtacggcttttttcttctttttcaaagccaaagcctgtaaacagcctgtcgtactccatctcgtagtcaaaccgctctttggaatatgtatccctgtccggacagctctcaagaagtatttcctcgattgtcttgtcctgattggaggaatcaacctgacggagcattccgattgtgatatttcgcgaggttacgattccaagactatttttgcaggcagtctctttgccatgtgctcctgacgacataccgcgatggtcatcgcggtcaagctgcatctctcctgcaagaagccgaagcaatgtggtctttcctgctccgtttttgccgacaacagctattttttctttttcctttatataaaaatcaatatgggacagaatcgtctgacctcctgccgaaactgtcccatccttaatctggtataacatatctaattaatatccttcaagctgtccaaaagttcgagatccgactgtaaaaccctgatattggacgtaaccggctcctgacccggctttgtaactgtgatttcaataacagagtctgccggaatgccgctgccgaatgcatactgtaaaaaggatacaaactttgggtggtttgctgtaaatgtattttttgctttcatcattttcattatgcttgctgggttcatgtattttctccaatcttatctatatgatatctcttttgacgcacatatctttacgttcgttatattataccatgagccaattctataatctatcattttagaattatttaatttcttacgattcctcacaataattaaagcgtacactatatcatatagcatacgctctattatttaatcacttacgttatgtattataatctcacaaccactattctttatctttaatgtatttaattattatagatgctatagttgatattatcataaatccagtagccatctctatactatacttatatgatattactaatgttattgaatcaagaattaaaataataatggatctaacagcccttcctctatgatattctttaatcgcatttttatcatctacgttatactcataaaaatatctatttatggatattcctataatattgattctaaaaccatgtaatatcactttagttatgcaaaaaatccataataatacaaaaaactgctgaagtgttataactatcattactatctacttcccatctctgctacctgtgcattcaatacaatcatgctcggactatctcctctattagatttataagatgcattatttatactatatgacattctaccagtaattttgtcataagtaatagtatatcttttagtaatatatgcatcggtaaatatatttttaccgttaattaccggcgcatatctaaccttttgtgtagaaaaacatacttccccagttatcatatctacaatagccccttctacaattacagttccaaaggcttttacgaatcgataataaatattttctcataagtccatccttcctttcacatgcgctttcagattataatacatactaagtataatataattgtgtaaaacctaaattaatttccctacaagaatatgtaaattatagatattttctgtgtatctgtcacgattaatgtctaagtcgatttaatcatcaatcatacaccgctctgccattcaacagcctttaattattaaaatgctctgcctgagctcaaacgacatcttattgaaattacctacaatatcatttatatgcactgcatcgttattgtactgttctcctgctttgacaaaattatcataatccggcaggatatttgactggatatattctgcaagttctgctgcattcttttgctgatatactgcataggtgccacaatatttcctaaataaaaaatatgctgtacttcatatttcaatatactaaaaacagatgacctacataacatatatgtaagccatctgctctgatgctaaaactaattaaattgtttactccttcacgcctccaagtgtgacaccggcaataatatattttgataagaggagatatacaacaataataggcacgatagctactgttatcatcatatagatttttcccatatcgaaattcatatagtccgctcctcgaagtgtggcaatcaaaattggtactgtcatcttgttctttgactggatgatcagggccggtgtgaagtagttgttccatgaacctacaaatgtaaaaattgcctgtactgcaattgcaggtttcatgatcggcaatactatatggttgaatgtcctaaactcattcgaaccatcaattcgtgcagcttctacaagtgatagaggaagtgatgactgtagatagctgtacatgaaatagaataccgccggcgatgctattgatggaatgataagtggagtccacgaatcatacattcccatatttgttattaaacgcaggaagcccatcgcagtaacctgtgtcggcataaccagtatcgccatgataaatgtaaatgcagctttctttaatttaaaatcataagcataaagtccatatgctgtaagcgatgaaaaatatgtacataaaactgcacatgagcccgatataataaggctgtttactattcccctaaacatagggaaggatccgtcattagctacagatttcagattatccaggaaatgcccgcccgggataaatgagaagcccttctgcagctgtgcatgcgaccttgtcgcattgattataagtattacaaagaagaacaggcataaaaatgataataatatcaaaactatatgcgctataacactgcggacattaattttatgttttggtttcattatttagccgcctcctttttctttcttctagcttcttttgcagctcgctttgctgctgcctttgatccgtcaggatcgctgtcatttgtcattctgtatacgatgaagcacagaattgcgctgactataaacagatataccgacaatgttccggccataccatagttcttactctttaagtggttgttcaggaacatgataagtgtcattgacgttctgtccggatttccctgtccgtttgtcagaatctgaggtacatcgaacatctggagtccaccgatgattgatgtgatgagtgtatatgcaagtattggtcgtatactcggtaaagttatatagaagaatctctgcaatgcattacatccatccagatctgccgcctcaaatacttctgtactgatacccatgactgctgccatgagcataatagtcgtattaccgaaccacataaggaagttcatgaagccgatgagtgatctggttccaaatacacttcccataaagtcgataggcttgctgattactcccatagactgcaggattgagttcacaggaccactgttcgagaacagtgtaaagaacaaaagtgcaaatgcagatgccatgatcaggtttggcagataaattactaccttaaaaaactgtaatttgtgaatttttaatctgacatcagtgaaccagtttgctaaaacaagtgcaaccacaatctgtggaataaatccgataacccagaggataagagtattcttaccatatgtgatcatatccgatttaagaagctcggcatagttagcccatcccacaaaattcggtcctatttgtttgattccggatctatagtattcaaaaaaactaaaccttaccgtatctactaacggaatcagagaaaaaattaaatatgttatgaaaaacggaagaataaagatatatccccattttgcataacttacgctctttcttttcttcttcatgagccaaattcctttctaccagagtcacctctgcgaagcccaaaggctccgcatggtgttttatttatcttatttcggccatgtaaccttttcgatatcaggataacgctctttaattgctgtctcaaagtttttcttagccttatcataatcaaccttaccctgtaagtaatcgctgaatgagttctggatgagctctacacatccctgatcatatgctgaaagaggtgcaatcttgatattctcagctaccggttcaaagtaagcaaatgggttctgtccgccaaggaagtctgatgcgaatgaatcatcttttgctgcttccttcattcctgattttgtatttgtgaaatcagagtaatccttagagatcttgagtaagttgtctttatttgctgttaaagcaaggatgatatccttaacatgcttagggttatctgttcctgttgctgcgtggaggtaagatccgccccagttgtactcctgtggtggtgttgtaacagcccatgatccttctgctccatcccagtttggtgcaagtgtgaaatcgattccccatgctgggaaaaggaatgcaaatacctttgactgagaacccattgctttgttccagtcatcattaaactggcctttaactttagcatcaacatatcctgcatcaagccactcttttgaatcatctacccagtttgtaatcttcttatccactacaacctcatctgctccaggctgtacccatgagttgtcgattgagtttccatataaacggaatgtatcagcgtaagaagataatgtgtagtatccctttgccttaagttccgctgctgtagcctttaatgtatcccagtcctttgtcttctcaccgattgcttcaggatcatctgttccgaatacatcctttgcaatatcgcgacggtaaactaaaagtccaggacagcactgccatgttgaacctctctgtactccgtctgaatcagaagctgtttttcttgtgaaatcgaactgatcagcaaactctttgtcacaatcaattccaagatccttaagaggcattgctacgtctgcatctttatctgtatatttgaatacgtaatctgtctctgataagaacatatcaatcttgtcatctgctgctgcatccgcctgttttgaaagagcttcatcaagcttctgctggtaaacaccatcctgattaggatttactatccaatgaatttctgtaccatccttgaggtatgtaattgtaccatctttagaagtttctttaacctccgggtaaacagcctcaactcttgttcgaaactcgtcgttccatgaatagatattgataacctttccctctgctgcattagaagctccaccttctgttccgtttcctgctgttgttccacatcctgcaaggagtgttgcccccatagacagtaacagcattgtgctaatcactttctgtttcatttttcatttcctccatagaaactgttttgatatcttcttataaattaatttgatatctcgtttacagttgttatattactccttaaccgttttcgtttatattaaatcaattgtaaaaatatcagattcatgtcataataatagaaagatgacataaatctaatattttgttacaaaggagaacctttatggcactttcaaaagaatggtatgacgcagaatttgttaacagcgagagcgaatcactgcatcgtgctccaagtattgaatatagtttttataacgcagtcaaaaccggggatatggaatatgtaataaaaaactgcaaagaagatgcatttatacacctagacggaacaggtgtattatccagaaatactttacagaatatcaaatatcactttgttgtcacaaccgccatgatcacaagatactgtattgatggaggactcgagcctgagcaggcataccgtctgagtgacttctatatacttaagatggacagctgctccaccgtacgccaggttgctgacctgcatcacgagatggcaaaggatttcacaggtaagatggtgctgcagaagaaatcgtctatcctctcaaagcctgttacccagtgtgttgactatatatacagcaacataaaagagcgtatcacaatagctgatctggctgcatacacagggctttccgagagctatctttcaagggtattcaagcagaatctcggtgtttcgataagtgattatataagggaaaagaaaatagaaaaagcgactcacctgctcaaatactcagataagccgattatagatatagccaactacctgtcattttcatcacagagccactttatccagatattcgagagttttacggggcttacaccaaagaaatatcgcgacaggtactacaaatccatgtggtagcctgatgccacatgccttgtactacgcacaaaaaattaccacgcaaacatgcgtgggaattttatttagctgatacacaatgatacaatatcaaacgctattaattttataaactatcactctatgtatatctcaaccgtatgacatttatctgtagaaagcatttcaatagcatgccttggaatacgcacgctgtttcctgtaacattttccacttttacatcatcacagagtgctcttttgacctgcgcatccccaggttcgagcttatcaggattgtgaactaaaatatcaaatccatgacctgcaaattctaacgaaacttttgcatcacctttttcgttatactgctgtggcatgagtacaggctcaataacaagatctccaagctctccatggactccgtatacagatgttatcatagtaagcatataccagcttgcggcacctgtaagatatgaatacagacctcttccatcattatcaaaatactccggtactcccggatacatcctgcttctgtcaaagtccatcgcagtatcaagaagcgtctttaataccttgtaaccctcttttataaagccctgtttatagagcgcattggcatacattacagccatatgtgagaatacagcaccattttctttttcaccatatgcaaatccaaacattcttccaagatcaaacttttcttccttaaaatcagtgtttagtctgtagccaccggctttttgatcaaacagatatttgtctgcgctattacagattgccttgatctgttctttttttgcggttccactcatgatggcaaatacctgtcctgtaagcatcatgcgtacatctccactctcacatctttccaccggtctgccgttattgtcataatatccgttgaaccagcctccatccgtgccatctggtatccattcgttttcgcggatgtttttcatcatccactcagccttatgctccaggttttcgcaaatcgcagctattgggacaagaacagtgcctccgcttgtgcagttctcacatgcctttgcatagctcatgagaagctcctgctttttgtcagggcagttgtaaagtatttcgtcatcagcaagcagcagcttaagctcatctaacacctcaatcctgtttattccgcttattttttccacatttcttaaacactttgctatatcaagcagatttccggcatatgcacatgtaaatgcaacactttcgcctttgtcccatgccatatcgagcgcatcgttccagtctgcaccgtgcagcttcatctcgttgtgctccccaacatcatagaaagcgcacagattttggatcagaatatgctctaaaaccgttccaaaatatatctgaccgcctgccgtcttttgtttgttaccatatgtagtattccatgcttcatcatggcttgtgcctctcatggactggtaatccttaaagtacgtcgtatgctcaaaaagtacatctgtatcaccggtctggtcaatataaagctttgtggttacaaatggccagaatgcgtgatccatccatacacgtgtgatgttatttctgtcagcaataaactcgccaggctcgtttcctataatagtcgcattggttccatcaattctcacaccgccataattgtttacaatcattctgcggacatccgaaggttccatcagtaaaagtgcaagacagtcctgccatagatctctccagcctcttccaccttttccataatcatgatgtggaaggaatgaacagccgtatattcttcgcaagataggttgaaaacatatccatttaagataattgtcctccttggcatttcctgtctcaaaatcaatatttaccttgtctatccagtgtttcttgacggtgtttagttcttcttttacttcaagtacactgcggtaccgtccggtaatggcatttatgtcatttcctttttccgtaagacctgcaagcatgatatagcttaccgtctccagcggttttataatacggtttgcaaattttattgctccgactgcttcttttccctgaaatttttctccggcctttgcacctgctttttcagttctgactgcctcaggaataaggaaagagcctccctctcctataaactgctcaacggtaggatagaaactctcaggactttctccgtttccggatgaaccatatacgaagtagcttatatcatttttccggtgtccacgctcatcaaatgagaggacaggtgtaacctcaataccgtattgtgtggtttctattctgtgcaaaagtgatgtcacatgcctgtgatccctgatattgtcagcacttctgccatagattgggattgccccgattgggactatctccatagcctcatctgtcttgttaatgatctccacaagcatgacttccatgcttccatcaagtgtgacaaatgatgtcgtgtcggcctctaacccatatatctttgaagcacggtgcagcttctgccacattaaacctgcctcaagctcactttcatcctgattacctgtaaatctgtcggcctcctgctgtgcagatgatccgcatactgaccagaagcccttcccaacaatccgacaccagaaatttctggtgcctttattgttgtgaagattttctatactaacaggttccagaagaaaggtattctggcttgttttactgtctccgccgagagttggtgtaatgcttgatttaagccctttttcccctgcaagtggcagatacagtccactgtagttttcgggatttttgatcctgaaggttccgtatttgtctataaaatctatatttttcatattttcaatcaatcctctatacaattacaaatcaaattttcacacaccatatacaatcctatagcagtcattatcccacctacggaaaatttacatggtaagctcaatctctgtctgctcgctaagaagctcttttggaatatagtctccctcaaccgcatgtccgtttacaaaaaggctcttgcatccgctctcaacatgatcaggattttttacaactatatgaagatggcatcccctgaaatccttctctatctcaaatccatcccaggcttttggaatagacggagcaatatgaagtccatagaaatcaggacgcataccaagtattccctctacacatccaaccatgactgttgaagcagttcctgtgagccagtgtacatgtgaacgtccaaagtttggacttgcttttccttcagtaaactgtccatagcagtacggctcaagtcttcttatctctgctctgtcattctgtgcggcaggagcattttcaataaaatacttaaaagctctgtctccatgtcctttaagtgcctcagcaagaattatccagccctgtgactgtgagaatattcctgcattctctttagttcccgcattgtatatcactgcgagtgctccgtcgaatgcgtgtgcatgatatggaggatccataagaatggcgccatactcggtattgagtctttcatataccatttcaagagccttatcagcctgctcatcacttgcaaatccacttataacagcccagctctgtgggttaagccacatatttgcctcaggatcatcacgctttccaataacctgtccatcccctgtaaatccacggataaatctgtcctcgttccagcaaagctcctgaatgatctttccgagtttttcctggctttcatcaagatatgtgatatattcatcatctttcttataggctgcaaactcttttaatatagtcattgcatagtagaactgaagtgctacgaaggttgactctccatctgcaccaagcctcaggcagtcattccagtctgcgtaaagtcctgcaggcattccatgttttccgaggtggttcatcgaaaaatcaattgctctctttaaatgctcgtaaaccgttccctcatccttgttggcgaatggaatgacctcatctataaatgctacatttcctgtctctgatacatatttgtatacagttgggaaaagccataatgcatcatcagctctataagccgggtgtcctgtctcctgtacataggaagcgtcgtcaggagtatcctcatgtcccggattgtgtgtaaacttgacaagcggaagtcctccaccgttatcaacctgtgctgagagcatgaatctgatcttttcaacagccatctcaggtgcaaggtgtataacaccctgaatatcctggactgtatcacggtatccgtatccgtttctgagtccacagtatgtaaatgatgcagcccttgaccagataaatgtcatgaaacagttatatgcgttccatgtattgatcattgtgttgaactcatcacttggtgtattaatctggaaatgtgataactgtccatgccagtatgcgataagctcctcaagttctttgtcgcagacagcttttgtatccgtgtaagaagcaacaatctttcctgctgtctcattatctatcattccaactaagaatgctattgtctttgtctcgcccggtgccagctccaatactgttgtgattgctccacagctattctcgttgtagttgccgtggttgttaagctttccgctctctactccgacaggattgccatatctgtgatattctccgagaaattctcccctgtcaccgcaccagctgtcaacaggtgctcctgcaagtccgataaatctgtttaccacatccttgttgtcaatttccttgccattctcgatgcggtcaagattggcatggatcatctgacgcactctgttctccacaaatactgtctttgtaatatactgtgaatactgcagattcacctgatcctgctcatagttgctgttgtttgtaaactcagcgtagcctgtaatattaaggcttcttgccttatcagaattatttgtcacgctcaaattccacacttcgtatgtcttgttcagcggaacgtaatatcttacttctgaatgaataccgctgtaatcagccatcatctttgtgtatgctgttccatgatgacactcactcttgtattcattcaaatcctttcctacaggctgccacgaagctgaccagtaatccttgctgccgttgtctctgatataaatatatctgccaggctcatcgaactgattaaacacatatctcaaaagccttccgtttgcacccgactttgcaaagctgtatccacctgcattattggaaacaattgctccatactccggcgatccaagatagtttacccatggtgccggtgtgtcaggtcttgtgataacatattctttttttgattcatcaaaatatccgtatttcatattacttactccattctctacttaattatgtgatctacggttataactgcctccaacgtatattcagcagtaatccattttcgtaatataatatacatttttgcagcagtgtattatacaaaattatttcttaaaatatcagattcatgacataactaaacttatctcacaatataagtgtaacttcctttaccgggacgtttaacatcttcatcgtagctatccttccggtatacacggacataatcgatcacatatggattattctcaaaacttgtctcatcgtttggatttccaacccagcttccaccaacagcaagatttaagataatgtaaatgcaggaaggtatccatgtccctttggaaccattgcacggcattcaaatcgtccatatatgaaggtctgcttattctgtgttgaaactcttcctgatgtatatgaagctgcttcttttgttgagccggtatcaccatcagtaacttttttgaccggatttattattaattttccatcttttacctgaatgttttcagccgagtctacatactcctgcagctcattatttacccatcctttttcatgtgtctccacattccagtcagcacggtttaatgaatcaccattaaactcatcgctccacacttttttgtagccatcatagcttagttcgcctgtctgctgcgccgcatccaacgctccctctgcaaacgtctgtgacggcatggctgataatactttttttttcataaggtacccctttcatttatagttatttgctatctcgcatcatattactgtccacacctttcagtgtaacccgtaaccatagcattactataacgattaagtgtccttaaagtatacaaaaaaaagcacaaaaacatcaaattcatgacattttaattttcctgtaatttccgcaattccctcggtgtcatgccaaactgcgccttaaacatccggctgaacaccttataattcgtaaatccattgtgctccagtatgtctgtgatggaatcctcagttgccagaagctcctcatgtatgtgattgattcttacctgattgacatactcaagaaatgtaactcccatgcattttttgaacatacggcagaaataatcctgattgagtgaggctatgtctgccgcctcctttaatgctattggctcctgatagtttttcgctacatatctgaggacatccttaaggcgcgctatctgtctggattcttttcccgcattcacctctttgtacgaataatttgtaaacaaaatatataagaattcgttcacttttgccataagccgaagctcatagcccttgcccttttttcggtatatatgcgctatcgacttaagaagagacttcatctgctcatattttctgctgccatgctcggtctcatagcactctctaaaccttatatgtccgtaatcgtctatgtagctgtccagatatgcatacggtatctgcaccagaagcaccctgactctttcatagctttgcgtgccatgtatcttatttgagtttatgacaaaaaattcattttcttgcaatgtatattcattttcaccgcagacaacctgcagtgagccggaaactacatagattatctctatatggtcatgccagtgcctcggtgaaaactgcctgtaatcctcatatctgtcgcagtagatcggaagatgtggtattgatctgacgttttcgtgtgtgtattgctgcataattttctccctgacttactaaatcaaacttcgtatttaatgctatattagcctgagcctatccaattattccgaagaaaacaatattcatagtttgaaattctaccttcaaaatatactcctctcacgcaaaaagtcaatatcgacctaaaataatgtcagtatcacaattgtatatatcgcttttataatttacaatcatcttatacgaaaagaacaagctcccgacatattaatatatgggaagctctttaaataataaaaatataagaaaggtaatctgctatgaacaaatggtcacgattcaaattcactcctaatcttccacttggggcaaatggtgaaagagttacaggaagcaaggctcacatagagctttcaaaggaagctgccaaggaaggcatggtacttctcaaaaacgaaaacaacgtactccctcttgcagcgggttctaaggtagccctgtttggaaagggtactttcgactatgtaaagggcggtggcggaagcggtgatgtaaccgttgcatatatccgcaatctctacgaaggacttaagcttcaaaaagagaaaataagcatatttgaggagctgtgcgattactaccgcaacgacattaaaaatcagtatgcagccggtgctgtacccggcatgactatagagccggatgtaccggctgagcttttaagcaaggcacaggcatataccgacactgctatcatctcaatctgccgctactccggagaaggctgggacagaaagagtgttattgacccaaacaacaaggctctctgggactacgaacgcgagatgaccgagaagtcggcagagctttttaaggatggtgatttctgtctctccgtaaaagaaaaggagatgattgacactgtaaaagcaagtttcaaaaatgtaatcgtgattttaaatgtcggcggaatggttgatacatcttggtttgcttatgatgatcagattcaatcagcactgcttgccttacagggtggtattgaaggcgggcttgctgccgctgagcttctcgtaggagatggcaatccttccggaaaaactgtcgatacatttgccaaatcactcgacgactatccgtctacttacaatttccacgagtcaagagactatgtggactataccgatgatatatatgtcggataccgctatttcgagactattccgggagctgccgagaaggttgtatacccatttggctatggactctcatacaccacatttgatgtggagactgtttcttccggcgttgtgaattccaactgtacgtctgaggccaataagctctacgcaaaagtccgtgtgacaaatacaggtaaattctccggaaaagaggttgttcaggtatacattgctaaaccacaaggaaagcttggcaagcctgcaaaggagctcgcagcctttgaaaagacaagagaactgcagccgggtgaatcacagcttatgatcctcacatgggaaataaacgatatggcgtcatatgatgaccttggaaaggttaaaaaatctgcatatgtacttgaagccggttcatatgatatatacgttggaacgagcgtccgtgacgtgacaaaagctgattactcatatatattaaatcatgatgtaattaccgagcagctttcagcaaagctggttcctacaagtctgccaaagagaatgctcgctgacggaagctatgaagctctgcctcaaagtgagcctgttgacaccgactactcagctattggcaacattgacccttccctgacagagggtgttgctcccggtcagagagccatcccatacttccgctttgccgatggcatggctaaaaacggcagtcacgacatcatggatgttgtggaaggacgtatcacgcttgatgaatttgtatcagagctttccatcgatgatctcattcatctgctcggcggacagccaaataccggtgttgcaaataccttcggtatcggaaatatgcctgaatacggtattccttctgtcatgacagcagatggtcctgcaggagtgcgcatagcacctgaggtcggtatatgcaccactgcgtttccatgctccacactgctcgcatgcacatggaacccggatgttttagaggctgtaggacgcgccggcggtgaagaattaaaggaaaacaaccttgcactgtggctcacccctgccatctgtattcacagaagtcctctctgcggacgtaacttcgagtactactcagaggatccattcgtcacaggaaagctcgcaggtgccatggtacgcggaatccagtcaaacaatgtcggtgccacagtcaagcactttgccttgaacaacaaggaaaccaaccgcaaaaacagcgattcacgcgtttcagaaagagctgccagagaaatctatctgaaggcatttgagatgattgtaaaggatgaaaatccatgggctattatgtcctcttacaatatgataaacggctacagagcctctgaaagcgaggatcttttgacaggaatactgcgtgatgagtggggctatgaaggaatggtcacaagcgactggtggacctgtggcgagcattacaaggagacaaaagccggaaatgatcttaagatgggaaatggatatcctgatcgtgtaaagaaggcttatgataagggtgcaatctctcgtagtgagatggagacctctgtaaagcgtatattaggattaatattaaagcttgattaaattttactctgctttatgcaaacctactcggttcataatacccgatacttattatacaaaaacaaaaacggacatgcaaaactgccatgtccgtttttgtatttgtatttgtatatcttcaatcattaattctgtattttagcatattcctcaattttgcatacatgctcttttgttttttcatcatagttaattgccacaagcaggacgtttcccgtatattgcaataatgaattcggatactgtctctcacgaatctgctgcatggctgtatccgcattcttattccatttcagctccacaacaagcgccggataatcatttatatactcaggcttcggaatataaacaaaatcagcaaagccacgccctgtcggtaactccctgaccggcttaaaataatagttcattgttccaagataagcaatggccaacacactgctaagggagttctcgtcattatattgaatcaccgaggtatactccatatgaatctgctcaatttttgctgccacagtatttacatctttgtttattgttgcattaaacaaatctattgactgtctctcaaactgtatgatttcatcccatttgttttcctcaactgcatccataagctcattgcgaagctcttcattcggaatatatgccatctgatttttctgattaaaagccagatatccaagatgtataagcaatgtcagcacatcatctttgtttttaaatgataccatatcattctgaaacgtggttgttctaacttttatctcatttcctgaaatcattgaaataatagcggctcttaatccatcaaaatccatgtcaataagcggaatcagagattcatatgtgccggtctgtgaccaatagctttggaagctgcctctcatcatcacgctcactaccgcttttggattatacacatgtttacccgaaagcatatagccgtcataccagttttttactgcttcataatccctgtcatactttttgcataactgcttaacctcatcatctgtaaagccaatatatgatgcaagcgctcctgcatcaagcattgtgaactcttcaaaattgttaagtgctgactgagtttttagctttttaataggaagtatgccggtaagataagctaacgcaatatactttgtcggctctgtccctttaaacattcctctgaggaaattaatatattcctcctgcagttccttattattagcctcatctcttatcaacacatcccactcatctattatgataacaaaggtatttcctatggctgcgtttatataagacatggctccataggctgttttaacagtgtccggtatcacatcaccatatgctattataagctcatcaagaataccgttattgatgtatttcacggtgttttgcacttcgcccgcatccatcatgcaccactggacatcaatatgaataacatcatatttattaaggtttgtctcaaaggaatcaagcctgcctacctttagagtggaaaacatatcaaaggaatcacatcctctgctataataagcagcaagcatattcgccgtgatggactttccaaagcgcctcggtctgctattgcatatgcatgccatatcagaacctataaccttattggtgtatgccaaaagcatagttttatccacatatatttccgatttcaatgtcttttgaaaagctttatttcccggatttaaaaatcttcccatgaattttcctaccttaatgaaataatttaacaacctatactacatgttaagtatagcagtttttaatcaacttcaccatatcaactttgaattatatacaatttaaactattactttccataaatattgtactcaggcacatccacgccatctgttccggcatagtatgacagctccacctcgttgagtccttttttcttgtcaagaatcacattgtactgggatgaatatataacatctccatttttattaaatctgtattcaatattcactccatctttgccttttaatgcctttcttggaatctttgcaaggaagatacgctcactgtcggaaatcttcttcacctcgactgcatccacccatttgaaaaatactggtgccgccactcttgtatcatccatgctataactgtcgtaatcatagtaggctgtgtcatcatcttctgtatcctttaacacatgatagcccatctgtatgctgtccacgccatcaagaccggtatcattgttgttatagctgcccgaatcgtaaggcgaatatacatataaaaggataagctgtgagctctttacctcatctatgctatccctgaataaatgtgccgcctttatatgagatacattgagctgtcttaagctgtcatttgtctcacctgccagctgtcttgcatacatggtgaccatacccttattttccataaagtccgcatctgccgcaagcgccggagatgcatccgtggaaagtgacatcagatatttgtagtctgtatcctccatacatactgtattgtaccttgcaaccagataatcaggccttgcaaatgcaagcacaagataacataccccgattactattattccgtaccgaaatagcgaaaaagcaggcttacatatagataaaatcactccgagcataaacagcgctatcactccaagtgcccagaacacacaaagcctggtggctgtcagcccgtactctgacacatacagtcccatacggtatgcacttgatgcaatcatgatatatgtgcataaagttattaaaattaaaaatgcatttaatattttattccttctgaacaatccacttccgagcaatacgataatcacattaagtatacacacgaaaagcagctggaaaaagccttctctcgcgtacctggcgtaggtatagccgcttggaagctgcataagtcccccgaacagatacacaatctgtataaaacaaaaaaatacatataccactgatatagttgcagctacagtgataccgattgcagccggaaatgccggagtctcaaccggtgcatccgatatacgtttcttgctcagatactttataccacagtacgatgagaaaagcgcaaatacaaaaagaaatacaaccttgctcactgtaaagaaattgatatcagcaaatattttctttattactgaggcaaaaaccgcatccgcagagcacagcaacaccactatcagcacaaccagaggaaaggcaattgctattccgataaacacataaagcattctgtgttttttcacatgccgctctccggcagttgcatttgcactgtcaccgaccatactgtcactgcccatattgtcactatccatgcgctcatttctcatatagtcggcaatatccataaacggctcagctatacatccaatcgctccaaacactgcctgaaatgccgcagcgatatactttatgagcccccactgtctgtcattgcagaaattgtgaagcagcataaaaacaagaaacacaagtatccagcaaaaattaaatccttgtataattttattaccgttcaagcctgacgaaaggcctgtgagtatcatcatcacactgtaccatatggtgagtggctttgcctctatatgaagtatcttcatacaatacaggctgtatactcctgtgacgattgcaaacaacgtaacaagtattccacctgtattctcatacaggaaaatggtgtacagcagcgcatatattatcgtaggtatacatagcctgccaaagaaatccgcgtttctcctgctttgttcacgccgtctttgctccgcctcctgctgcatcttctgcagttcaatacccgacacccccatatgtggctgtgaagtctgtggcgtgttctgtgaaaactgttggggattcatgcccccgatattattattgtccatagctacctccttactatctatgtagttattttctcatattttttacttaccggcaagctaattgtactacgctgtttttagttttgcaataactttttatcgcatctcgataaattggttgtaatcgttataaatgtcaggtgaatgtcacattaaaaatgagtaaatagtaacctgagacgcgtagaaaaagttgtttgaaaatgttaaggcttactgataaaacaaaaaatcgcagataccatattatgatatctgcgactttacttatcttattttctcctaaagacactccaatggataatgactgaatacagtcatagagttttattttaaactactgctgcacattaaacgctttaattcccggataaactgcgctctttcccagttcctcttcaattcttaaaagctggttatactttgcaacacgctctgagcgcgaaggtgcacctgtctttatctggcatgtgttgagtgccaccgcaaggtctgcaattgttgtgtcggcagtctcacctgaacggtgtgagctgattgctgtatagcctgccttgtgtgccatcttgatagcctcaagagtctctgatactgaaccgatctggtttaatttaatcaggattgcatttcctgctccaaggcttattccctttgcaagtctctcagtgtttgttacgaacaggtcatctcccacaagctgtaccctatcgccaagacgcgcagtaagcttctgccagccttcccagtcctcctcatcaagaccatcctcgattgatataataggatatttgtcacaaagctttgcccagtgctctataagctcctctgaggtgtactctgtgccggcctttggcagcttgtaaaagcccttgcccttttcactcttccactctgatgatgcggcatccatggcaatcttgaaatccttgcccggctcatagcctgccttctttacagcttcaagaattgtctcgatagcctcctcgtcagatttgagtgccggtgcaaatccaccctcgtcacctactgacgtggcaagaccgcgctcctttaatatggctgcaagtgcatgaaatacctccgcacaccatctgagacactccttgaaggaaggcgcacctaccggcataatcataaactcctgcacgtcaagtcctgatgagagtgcatgacagccaccgtttacaatgttcatcataggtacaggaagtctgtttcccgagataccacctaaaaatctatagagaggaatatcaagtgatacagctgctgccctcgcacacgcaattgatacagcaagaatggcattagctccaagcttagacttgtcctttgtgccatctgcctctatcatagccgcatctattgcatagatatcacttgcgtccatacctgtcaatgtgtcgttgattacagtatttatattttctactgccccggtaacacccttgcccagatatctgctcttgtctccgtcacgaagctcacgtgcctcgaactctcctgttgaagctcctgatggtgctgtgcctcttgcaacagttccgtcaaccagataaacctctgcctcaactgtaggatttcctctggaatcaagtatttctctgcccactaccttttcgatttctaaataattcattatgaacctccttatgttttttctgattcaattttatcctacaatacagtttctctatatcatgattgtaggattgaatgcaagcatgcatcgatgataccttttgaccctttaatcataaaaatacatatgtgaaagcctgccgcatatgcatatatttataaataaagaaaaatgctacacagttagtttaatctaactaatgtagcatttcaatagttcataatgataatatttcccaattatagaaatattatgttctaacatatcattttaaatgggctgtaatcgttgctggtcacactgttaggtgtgaacagtaactatctttaacagcaactatctctctgcctcaatctcacgcgcaacatacacgccgcttgccgacgcatgtgaaagtgaatgtgtcacaccgcttccgtctccgatgatgtaaagtcccttatatttgctctcaagcttatcgttaagctctacctccatgttgtagaacttgacctctacgccgtaaagcaaggtatcgtcatttgcagttcccggtgctatcttatcaagcgcgtaaatcatctcaatgattccgtccaggattctctttggaagcaccaggcttaagtctcccggtgtagctgaaagtgtaggagtaacgagtccttcctcaatacgcttctcattgcttcgacgccctctcacaagatcaccaaagcgctgtacaattacaccgccaccaagcatatttgaaaggcgcgcgatgctctcaccatatccgttgctatccttgaatggctctgaaaaatgcttcgcaacaagaagagcaaagttcgtgttttcagtctgcttgtctgctccctcgtagctgtgtccgtttactgttacgatgccgtttgtattttcatttaccacgatgccatgcggattcatgcagaaggtacgcacattatcctcaaaaagctgcgttctgtatacaatcttgctctcatacagctcatctgtcagatgtgagaaaatcagggccggaagctcaacacgcacaccgatatccacacggtttgacttggttgggatatcaaggtcattgcagaccttctccatccacttgcttccgcttcttccaactgagatgatacagtatctgctctcatatgtgctatccgctgtttttactgcatatccggatacattgtctgtgtgagcctcttgtaaactgcaagcatcagcacctgctgtattctcatcatacagcacctctaccgactcaacaggtgtatcgaaataaaaatccaccttatccttcagatgtgcatacatattttccagaacaacatagtttatgtcagttccgagatgtctgaccgatgcatccaaaagcttgagcttgttctgcatgcagacctttttgagctttgtgccggctgtagaataaagctttgtgccctcaccgccgtacttcatattaatctcgtcaacatattccatcagatcaatggccggttgcttgccgatatgctcgtacaaggtaccgccaaaatcatttgtgatattatattttccgtctgaaaaagcacctgctccgccaaaaccgctcataatagaacagctcttgcaggaaatacagttctttattttctttccgtcgataggacattttctcttagcaagctcatgtcctgcctcaaaaaccgctattttgcagtcaggatttttctcgataagctcatatgctccgaagatacctcccggtcctgctccaatgattatcacatcataattattcatctgtcaattgcctcccataatacgttgctgtttgtacgcccaatgtggcgcacgccagtcacttatgatactatattttctccattatcgcaagagcaatctctatattccagcaaatctcccggctgacagtcaagtgcttcacatagctttgcaagcgtggataccttgattgcctttgccttgccgttttttaaaattgatatatttgccatggtgattcccacacgctgcgacagctccgtaacactcatctttctctttgcaagcattacgtctatgttaaaaataatctcgccttccatgtatctctcccgctcaaataaaactgtagcgcacacgctatattgtcaaatcactctgctcctgcagatctgcggcctttaccacaagatgtgacaaaaccgccgccacgaccgatgccacaacacaggcaaacactatgaacacaagagccagtatcacccccggatgattcacatatatcctccacatgcagacattcacaacaaaaaaatacaatgcatcaaacagaattattttcgatgccagctttatatgtctcgcattctccaaggaaaacgacctgtcttttccgatatttacagctactctccagcccagatacaatataacatagcacggaattgcactgatgataaacagaacaagccatggtatatacatatcagaaatctgcggatcaggcgcaataagcacatgccctatccatggtatggcaaccgcacagaccactaatccgcaaagtgctaccgctattattactatctttaaccatttttcaagttctttttgtctcatttattcaccttgcttctcattgagaagtccatactctgcaagaagctttttttgatactccttatcctttgaagctttctgcaattcatcatatttgccttcggacaataaaatctgatttagctggttaatcaaatctattccttgtgctaagccttgttctaagccttgttctaagccctgttctaagccctgttctaagccttgctttattccttgttctaagccttcctcgatagcatcagctctttcaagctcaagctgcctgtcaaattcataatttaactgcatactcttcgtcacctcacttctgtaagtctttagaaactccttcagaatatcattgtcaatacaatagtctatagccttctcaatatctatagcaagatcatcaaatgccccgtctgcatgatactctctgaccttatttacaaatgtcatataatcattcagccagccacaggactccataatagccttgttctttccatcgtttatattgtacaccttacatttaagctcaagattcggctcgtcggtcggcttctcaaacgcatcggacagcttaagctcctgaacctccggctgttcctcctcaccattgtaaaataccacaaaatgtggtgtcggtatctttaccagtcttctgccatagatgttcttgccactttttgttccttttttcttgtcgctgagcatatctgacaatatcacactaaaataaataagacttctcaccggcatattcggacaaactgtggactgatgctcatatatgctcagtctcgcatccacgataaacgatgcatcatttctgaccgaaagtgaaatgccgccatcgtgaatcactatctcaacatcctccggattgtcatagctagacccattcattgcgttatacagctgtaaggctctttccttatcctgcatcagcatactgaaaacatcacttttgtactctctgttaccactcatataaaatcctccttcatttgaaaacactaaagcaggaaatatctgtgtggtaaaagccctcttatcctgctttaaataaaataatgaaacatttaaaagcaagaatttcagggaatatgaaaaataattaaggtattgaagaccctgcacgcccttatcgccggacgacatcttattatgcctcacatatttacagagcatatagtcatatctgtaattaatgtgccaacgaccgcacaggttgctatagaaaaactgctttgactatattctaacatatatggataaaaaaacaacaaaaaaatacgcaacagaaaagcctgttacgtattttgacttttttattaaaaacataataatctgatgaaaacagttactataagtattaatgctattgctttttctgcaatatatgaccttgcatccggtacataagttttctcccagattgagtatgcacatccacaccccactacaaacatgcaatatagcttaaccgactgtgaattcatataatcggtgaaaaacattataataatccatactgttaaaaacaacattaaaactaagtactttaaaaataattgaattttcttcatggcaaatcccccttaaatatataactgcatcattatgtttccataaatagtttccttcacttatatagacgcaatccatgcttatatactaacaataaccaagaaattttttcaatctctactttatcaccaccgcaattacataatcctcaagctcacgaaacactacccttttttcataagcctccatcgtcttatcatccagcttccccgaaaagcctgtaccgacgagcttcattatcgcctcatactgcgtccagtattttgtaagctcaatctgaaatgcctcagattcattctcaaagccttcgagtctgtcaagctgctcatttcgcattatacgctttgccactttgtagctcatgcgctttgtatgctctatgtccacgccaacaagtctgtctgatattgcaagcaccacatatgggccgctgtgtgccagattaaaaaaagctgcgctctcattcttatatcctgctgctatttccggcttaccatgctcatttctgacaagctgttcatccgatgatatccccagatatttgtagagcatgtatcccgccaaaagctcctgatttgctgtgccacacagcctgttgctgcctgtttttacacctttttctgaaatagttgtgtatttatccacataataggcagacacatgtggaattatctccttctgccggcctgcgatggaatccgttttttctataaaaatctgacagttattgtttattttccataccatcccaagtcacctttctataactccaaccttcccctgccttcatcaaaatacaaccagtattataaattacccatataatatctgcagcttatgctaatcatacctacgatatctgcagctcatacagcttcctgtatatgccatcctgctccagaagctccctgtgcgtaccgcgctcacatatacgtcccttgtgcatgaccatgatgcagtcagcatgctggatagtggacagacggtgcgcaaccatgattgttgtcctgccgtccatgagcttttcaagcgcctcctgtatgagaatttctgtctctgtatctatgttggcggttgcctcgtccatgaccagtatgctcggattgtgggcgagtgtccttgcaaaggacaatagctgacgctctcctgccgagaaggttgcaccacgctccgtaaccggctcgtgatagccctgtgggagcttttcgataaagtgtgaggcatttacatattctgctgccgccttcacctgcgcatccgtgatatcgtcatcattcaggcggatattgtacgccacatccccctcaaatataaacacatcctgctgcatctgaccgattgcactgcgaagctgctttttgctaagctgtctgatatcgatgccatcaatgtagatatgtcccttttgtatatcataatacctgcctataagatttaaaatggatgattttcctgctccggttgcaccgacaaaggccaccttctcgcccggattaatgacaaatgagacatccttaagcacatagttttcgccgtcataggcaaaccagacatggtcaaattcaatttttccggtgattttatccggctgctttggattttcgacctcaggaataaattcatcctcatccataaccgtaaatatcttctctgctgatgcaattgatgactgcagtgttgaaaactgctctgcaagctcctgtatcgggtcgaaaaatgacctgatgtaattcgagaaaatatacagagtgccaaccgaaataatctcatcaaacacatttctgcttccgaaccacagcactatcatcagtgacaaaatgctcagaatatagataagcggacggaacaccgcatacataagcatctccctgtaaaaagccttgtagagctttgtatttttatcatgaaattcctcgaacttgcgctcctgtctgccaaatatctgtataattttcattccagaaagatgctcggacaaaaaagtattgatgtccgtcaggcgcgtacggtaaagcctgtaaatatttctggcaattttctggcacagcaccgtaagcccaattacaagcggcatcagcacaaatgatatcgcagcaagcctaacatcaagcacaagcataacgcctgcaagtcccactatttttacaatatttctgaaaagctgtacgagaatgcccgaatacatctcattgagagcctcaacatcatttgtcacacgggttacaagctttccaaccggcgtgatatcaaaatacctgcttccaagagactggatatgtctgtataggtcttttctcatctgaagaatgatattctggcctgttttctgcagtatccaggtctgagcgatgttgaatgcaaagcttaaggcaagtacaaccgcatatttgatagctgtagcaattattacatcataatccccatttgctccaaaagcatcaattgcatcacccaccagcatcggcctgtaaaggtcaaaggctgtcagtccaagcaccagcagaagggcaaaaatcacccagtgggcatacggcttcatgtaggctatgaggcgcattgtggagctttttttattcatttcgtttttatttatattttcactcgaattcatactataatcttctctgttatttcgtaactattcatcgtcaaatctgcatagcaactcttttcaagcactttaactgccaagctcactctcaagttgctgcttatggctgatatcagcgtaaaaaccgccaagctcaagcagctcttcaggagtgccatactctgtcagttttccgtcagaaagcactgccacatggtcagccttctgcagtgtggaaatcctgtgggcaatcactatggttgtcttgccctgtctggtttccatgaggttttcaagtatctgctcctctgtatcggtatcgacagcagaaagtgaatcatccagtataaggattgcagaatcctttaaaagtgctctggctatcgagcttcgctgcttctggcctcccgaaagtgtcactccgcgctctccaaccatggtcttgtactcatccggaaagcccatgatattatcgtgtatacacgcgtcctttgcagcctgttttaccgcatcaagaattgccgggttgtcggcaatcctgtcctccagaccaaatgctatattctcctcgagtgtgtcggaaaacaggaaattctcctgtggcacatatgagatatcacggtgtaaaaccgccagcggatagtctgttatcgggcgtccatccaaaagtatcatgccgttttcacaatcatagactctaagcaaaaggtcggcaagtgatgattttccgcttccggtacgtcctaagataccaagcatctcgccctgcttcacatgtatactcacgtctgaaagcaccggcttggagccgtcagggtatgtgaagctgaggtggctaagctgtatatcgccatgtatttgtattttatcataaataccatcagctaaattatctgtatttctgcctgccatgccatcattttctattacattttccggtggcaccatatcgacaatatcaggcttttcctcgaaaatagtctggattctgccccatgccgcagccgcctgagaaaatgtgttgatacagtcgcctgccgcaatcataggccacacaagcatatcgatgtatgagttgaatgccacgaactggcctatcgaaacctgtccgtcaagcaccatcctgccacctgcaaggagtgtcactatcacgcttattccgattacggcatccagcgccgggccaaagacagcgcgaagctttaccacagcaagatttttctccctgctgttctcgcaagccttttcaaactgcttaaagtcctcttcttcctgcgcaaatgccttgaccacgcggataccggcaatgctctcctgcaccttgtcagacagataggagaaagcatcctgccttttcacctgacgtttctttgactctatcccataaaaatagcagccgattgcaatgaaaataagtggaataaaagcaaataatgtcagcttaaaatccacgtatactaccattttgacaagcaccatcaccgtcatgattaccgcgtcaaacacggtgatgacagccattccggttcccatcctgacagcctgtaaatcgttagtgaaatatgccataagatctcctgtcttgtggctgttataatagcgcgctgagagtgtctccatatgtgaaaacatatcatcgcgcagtctgtattctattcctcttgatgctcctatgatgaaatatctccatccaaagcgccccgccatgattatcagacctgttatcaatatcttaaatataatgccgcccacgcccgccatatcaagctttcctgcagtgattccgtcgattatctccccaataaactgcggaatgtacagatttgcaaggtctactgcaagaagcacaaaaatacctatcgcatagtgccatttgtatgcaagcagatatgggcgcagcgagtattttttatcgttcatgttattcctccgtattttaaatgccactgcgtggttaacccggcatgcggccatatgctctctaggagctaacgctacgctgttaagaggctgtacgaattatgctcatagtttttctatgctcgactaaaccggcttttatgtgccgtccatggcacataacgccttgccccggcgtccatgccggtgcatttctggttaccagggcataattctacagactctaaacagcttcgctagtcgctctacgagagcatataaccgcctccctggctaaccacgctacattctctatctacctccacaagtctgctacgaaatacgtgagtgccgcccatgtatacacagaatagtatatgccgtgctcgtccactccatcctcaagtatcttcttcgcctgcgccttagtcagaaggtcgaatccgtcaaagagctcgccgcccactgcgccatcctgcgacattccattaaggctatcgcggttaagtacaatctttacaagggcgttactttcatctgtcatgcccggtgtactgaaaagacatggattgattatcgaaacctcatcttcttctgtcactttaagtcctgtttcctcatgaagctcacgcatggcggtttttataagtgacgctgtattatcattatccccggtgcaatcctccggatcaataagtcctgcaggtacgcttagcaggtactggcctgtcggatatcggaactcgcgattcattaacagacatggctcatgacctgatttctcgtcatcacctgacggattccatatcaccacgcagctcaccgcatccggaagcattttcttgaactcctctgtggatttggcggctacaaggtcttcttcatctctccttgtggcattataataatgcctgccctcttggtactgaaggtcaaacacctttataaatttcgattcaaataagctttttattttcataaatttttgtctcttttcattaaacctttaatgtgctcagatactccttctgctgtggcgtgatgcgatagctctcacgcgccttttgtatcgccttgttgtgactccagctatccataagcctttccttcagtatcggcagcactgcatcatactgctttgcaagtgccgtagcgatataccacgccttcatcatgtttacataatactccttggaacggatttttgccacatctaaagcatattttatatcaaaatcctcatcgagatataggcgcatcaaagtgccaatgccatacctgacggtgtagggcttatccgaatccagccactcatatacatgcaaaagaagctcatttttgtgctttttgaacacagccggcacaccactgtcgcaggtcgcccagttgtctatgtatggcagaaatgcttccagataagccaatgctgtatcataatccctcatctgcataatcagaaacatatgcaggttattttcctcatagtagtaatgtggcagagtgtttagaaacttttccacattgtcacagtcattttccttcactgtattacagacccgtttttctttttgaaccgacaaaaagagcctgctgccatgagcaagctcctttgcatactttctaagcaccgggactcttattcctattatgcgttctttttcaatattgggcataagcctcgcatgaaattccctgtaatttttatcctgcagcgcaaacagattctctaattctgccaacaaatctttccctccgtaataacaggatatctgataagcagcttctcatcaagattctccctgttcatgtctaccgctgtgatctggctattgtcatatgtggtgtaataatagattcccttatcgcagttgcagcatgaggtatagagtgtaatctcatatttgccctctgtcacctcgcacagacctctctgctggtccacagagcctaatatgtggaagaactggctcacacttgcattctcactgtcatccgatttggagttttgctttgtgaatgccacacgtacaaagcgtgactgcgatgataaatctcccggcagtcccagacctcccattccgcggctatatgcactaagctccactcccggtgcaaatgtattttcaggctgctttgtggataagcctctgtaattattgagtgcagccatctgatatgggaatggcggattgtttgttagcacacctaccggattgtcgtaaacatgcataccgtctgccatcgactccaccacaatgcactcatttttgtcggctataatccagtgaagctgtgcaaccggaagctgactgctaaatggtgtatctaccagtaaaatacgatttaatttttcctttgcatccgctaccgtagcgcatagtgacagtatccacggtataaactcaaactgtgccacctttgtctttgcaatgccgcatgtgccattctcgcatgagctgttttcgtctgctgccgcatacgctgcatttcccacgaaattcagtcctgccataccgagtcccttttcatttatagcatcatagtaaagaggatagtcacctgccacatgtgccattccaatgattgcataatggttttcaagctttcccgaatgcctgaaattaaacacatagtttcgcggtgttaccgcaatctcatctccatatgaaaattcgtagtcgagtgttcttccaaaatagaaatcctttgttttataagttgctgctgtacacataattatgacctccttgttatgctgccatacttaatcagtatctcttaaattgtagagtactatacatcatatttgcaattatttcaagcaacacacccctaaagtatttgaacaaaaagcaacagccggtctgatatccggctgctgccttaataagtgctgtgctattcctgtattatgcctgtttattgtcctgctcattatcaagtgcgataagctttgcaatgatttcctcgcatatctgtgtaacattcttgccatctgtggcaactgttacatctgccaccgcctcatagcgctcctttcgcttttccataaggccgctgatatactcaacattcatgttgccgtttagtatcgggcgctcgtcactatcctttactcgctcgtagatagtctcaggctttgctgtaagaagaacgacacggccgtttttcttcatatgatctgcgttttcctctctcatgacaacaccaccaccgcaggaaacgatagtctgctttctcttctgaagctctataagtgtgttgctctctaagtttctgaaatatgcctcaccgaactcatcaaatatttctgaaattgacatgccacgattctcaacaatcatctgatccatctcgacacggtccatctcgagcttatcctttaattctcctgctacagtgctttttcctgcacccatgaaaccgatcaggaatatattgtaatcgaaaaggctctttgcctggatacgacggctgttcttcatgatatacttgaaaatatcaagtatctcttcctcaaattcattgtcgccaagctttgccgcaagtgcatctgtctgctttttctcctgctccggctgtaagattgggattcctgttgccttcttgtatgatataatctcctgaatgtgtgacattctgaccgcaagctgcttaattattatatcgtcacattctccaatctttgcgcggatttcctcgattttgtccatggtgtgtctccttacttatgtgtggttttcatattggattttgatattcagcgaaatatcgtcaaattataattattataacttcacgttatagtatttcgcatttttgataaccacaaatttcttagtcatagtataacaagactttaccaatttatcaagcaaaatattttaatgctttaaagtgttattgtgtcagatatgcatccacaatatcagacgacacatttttctcaatcgattcatatatctgctgacactccttgcgaatctgctcatgcacttcatcgcttaaagtgatgatttgtgtgccactgtcctcgatagtctttatctttgaggcaatccgctcgtcagactgctctctggcgtactgtttcgctgtctcggctgcctcacggataatctgctgctgttcatctgtcagtcctttcatgaactcctcgcttactatgagcgatatcagatgtggcagatgatttgtctccactacataatcctgctgctcgtagagcttattggatacgattacctcgtatgggttttcctgcgcatctatggttccctgctgtaagccgatatacacctccgagaaagtcataggtgtcgggcttgctccgagcgccttccagtatgccatatgataagagttttccatggtacggattttctgacccttaaaatcagcaaggctttctatctttttgtttgttgtcatgacacggaacccctggtctgcatatcccaaaagctcgtagccaccgtcattatagacctgctgcatgagcttcataaactttggattgtccacatgctcacgcacctcatcaatgctgtcaaaaagtgccggcatatcaaatactgcagtatccttcatgaaagtgacctgcggtgcagtgttctgcactacaaaaggtatatctccatccttgcatgactcgagaagctctctgtctccgcccagtacactgtttggatacacactgattttcatcttgccatcgcttaatctgtccacttcatcggcaaatttctctgcatatatctgtgtcacggtgtcctcaggacttgagctaccaagaggccatgcgtaacgctgtaccccggcatccttagctgcagcctgcgagccttcaccagctaagccgcacgcggcaagtcccgctgtaagcgaaagtatcatcatgacggcggctgctcttcgccacaatctatatttgctatacgatttacgcggtttactatatttaccagcttttttacataaaaacaagccaaatctactcatatttttctccaattacaactgtgtgcctaaatgtcctacaatcatcattaaatctgcttatacctgttattacatatttctgtaccgaatagttactatttctctataataagcacagactgattgccggaataaatgtaagcagcagaagtgccagcaggaaatatcctatcataggcgccgccttctttgctatccgcatgaccggaacatccgtcagtgagcttgccacaaacaggtttactcctataggcggtgtgacaaatccgattgcaaggtttacgatcatgaccacaccaaagtggatcgggttcattccgatgctctgcacgataggaagcaggattgggcttaaaataaggatagccggtgtggtatccatgaccattcctacaataagcaggaaaatgtttatcacgataagaagcactatctcatttgtaaaatgtgcgagtatccatgcgctgactgtctgtggcacctgcatgagtgtgagcacgcgtgaaaacgcagtcgatgcggcaagtataaacaatataggtgcgtatgtcttcatcgcctccaccatgatgccccatatctcttttacctttatggatttgtaaataaaaagacttacaaaaagcgcataaaatactgaaatcaccgcagcctctgtaggcgaagctataccggcgtaaatgcatccaagtactataaccgggctcaaaagtgcccatatactgtccttcaatatactaaaaaggcccttgcttctaagctcagagacctttgcatttatcttttccttgtcctctccatagcgcttgcagtgataatatgcataaaacataagaagcgctcctatcaaaagtcccggaatgattcctgcaagaaagagatcactgaccgactcaccggttgccatcgcatacatgataaaaggtatgcttggcggtatgatgactccgagtcctcccgcaaccgcaacaattgccgttgaaaaatcctttttgtagcccagctccataagaagcggaatggtcatacttccgacagccgcaacagttgcaggcgcagagccggaaatcgctccatagaacaagcaggtgatgataaccgcacatgggattcctgcggttctttttcctataaaatacacaaaaacatcaaacaatttttgtgagattttgccgtgtgccatgacgattccggcaagcacaaacataggcaccgctaaaagcgggaagctgtctataccaccgagcatagagcggataacatagctggcactggctgtaaaagatgagtcaaacgcacccggcagcactgccactattcccagggaaatagataccggaatagcaatgaccagacatatcacaaataatataaaaactactgctgctgacatctatttctcctttctcttttcagctttactatgaattgcttcaatatcctccacaagctctttctcgcggtaagtatcttcgacaacggcttcctctataaccgaggcaatactgccctcctcaagaggcttttcatcttttttcaggacaattttccactcgccaaaccatctctgcgcgatgcggaaggctgtgattataaagcatacaaacggtgcagcctgcacatagtacatagggataccgcaggcaggacttacctgaccgctttctattgtatttttcagatatatgaatgaatacggtatcagatatacgaaaaacacaaactcaactgtcagatttaataccttccagagtgattttcctcttcgtggaaaaagctgtataaactggtctatctttattgatatgcatttacgtgtgcaaaggctgacactcaaaaatgccgaccagataaacaggtatcttgtgatttcctcagaccatgaaagcgacatgccaagaatatatcttgaaaacacctgaatacccatgataagagtcatcgcaatcaggaaaatgaccattaaaaattcttcaagatattcatccagatagtgcagtattttcttcatgaaatatcccctttccgtgaataattatacgtattatttttactgaattattactgttttttcacgtaaatattcacaattttatatattactatttgttatcatcttcaaaaatggcgtcacagcacatagtttacagatgccgaggcgccattttattttatcgcatggttttatacaagcttttcttacatgctcttatgaagtaatccaagtaccgtagacagatcctctactcccatctgtccgggtgcagatgctttctttgcggcaccgaatgtcattgaagatccgaatacctcaccgcagagacggcttataacacctgtgcctgccattgacattgtgatgattggtctgtcagcgtaatctgtaaccatttcctctgtagctgaaagaagtgtgagtacgtctcgcttattctgtggcataactgcaatcttagggatatcagctcccatatcctgcatcttgcgaagtctgtaaacaatatcagactgtgcaggagtcttgaagaaatcatggtttgaagcgataactcttgcacctgcagcatgtacgccgtcgatgattttctttacaatctcatcgcctgtaaaaatctctacatctacaaaatcaacgtatcctgtctgtgcagccttgacattaagcctggcataagcctcaggctcgattgctttctctccgccctcttttgaagtacggaatgtcataaggattggaatatttccgagagcatcacgaagctcctttaatacctcctcaaccttgtcaaactcgaatacattctcgaaccagtcaacacgccactcaaccatatcaacagggatagagtcaaatgtctttgcctctgcgatgatgtcgtcttttgtaacgcctacgataggaacgatgattttaggtgcgcctgcaccgatttcaatatctctaaccttaatggtgttcatgattttttcctttcttaccttgtattagactgtatgataattatactccccagtataatgtaacgtattaatcctctttagacagctctaccatcttagtatagcgcaggtttacgaataatccaagtaccacgccgattgctgtgagcacgatgttcattaccataacctgtgatggctgcatctttgatgctgctgtaaggattgtgtagttacaaagtgatgaagcgatcattacaagcgctgttactgttcccttgatcttagggaagagcatgttgcatacagatgttacgatctgtaaaagtccgcctgctcctgcccatccgatgatgaatgcacctgcgatcatgagtggctttgtctgtccgactaacactactaccattgttgcaaggcagattacagggtaaacaaggataaatctgacgtccttgatttttcttgttaaaagtgcagttacgataagagctatcatggttcctgctgagtagtatgactgcataactgacggatcagcccagcctacgttctcttttgcaaagttctgtgcacagttgagccataactggaaggttcctgtacatgtaaatccaatgataatcattgcgattgactcaacagaaaaatgtgtgtgctttaagcttgcgataagtccttctttctttccctctgcctttgcatcgctatcaggaagcgggaagatcattactaatactaaaagtacaatgtagatgattccacatccgaagaacagtgtgttgtatgatgtaagtcctgctgctgttgtagcaactgtcataccaagtacgaatggtaaaagcatctgtgcgatagcgatgaagaatttgattcccattgtcgcaacacccggtgctttgtagatgatttctgatactgcagggtaaattcctgtatcaaggaatgagttcgcaataccgccaatgatagcacagatataagcaatctggtatccaccatgtgttcctgcattgaatgcaagggcaagtccgatcaggtagatagcataagagccgcttccgattgctgttgagatacggcgtccgagcttatctgataaaggtcctgcaaacggaagtgcgataagacgtccaagtcccagggctgctgaaatagctgtaatagccataacctgcactccccatgaagccgcgagagcctccttgatgactgcctgtccgaggatagagcagcccactccgtgtataaagtagtttaagtaaaggattaatgcgctaggtaaatattttttattcatcagtgttctccttaatttctgtcaaaataattcaatgtgatttaatttctgtgtctgattaatcatcatatctgatgtttaatacttccttcatatgctcgattggcatatcttttcctgtccagagcttgaaggctgctgctccctggaaaagcatcattccaagaccgttcattgtcttgcagcccacctcttttgccatagaacgcatctttgtctcaagtggagagtaaggtacgtcaattacgataagctcaggacggaagaatgatttgtcaggtactacagacattccctcgagtggcttcatgccaacacctgttccgtttacgaagatgtaggaatcagccatctcttctcttaacttctccttgtcatcaaggtcgtaaagagtagccttgcagtctgtcttctcgttgatttttctaactgtctcttcagcgtttgcccagaacttgtcatggatattgaagattgagatttccttgacaccgtcaagtgctgcctgaatctcgatagctgtagcagctccgcctgctcctgcgattgtcatcttctttccgataacatcgatgtcgttatccttgagcgcctgcatgaagccgataccgtctgtgatgtgtcctgtgagtactccgttctcgtttactattgtatttacagctccgcaaagctctgctgcaggtgaaagcttgtctaagtactgtcctacaactgtcttgtttggcattgatacattagagcctacaagctttaatgctctgattcccttaaccgcatcctcgagagtgttgttatcaacctcaaatgccagataagcgtagtcaagtccaagatatgcaaatgcctcattgtgcattgccggtgagcttgaatgtctgattgggtaagccataagtccgatgagttctgtgtgtcctgtgattctctctgccatgattaaatctccttcatttttaaatgtgataatattgattattcgtattttacttagctatgttttcaacgatgcccacttcgttaaaaacttaacaacctttgataatgatattataacgcattatttttggtacttccaatgcttattttgttattttttaatagcattactgtactaatcatgttataatatgcacaaatttaggctataatatttgtaattcatagactgtatctattattttacggagatttatacatgacactcaatcaattaagttatttttaccaggcggcagttctggaacacttcaatcaggctgccgaaaaaatgaatgtcacagagccaagcctcagccgttcgatagctgctttagaggacgagcttggcgtcactttatttgaaaagagaggcaggaatgtaatactgaccaaggctggggagatttttttagaacacgtgtctactattctggacgatgtaaagagagccgagagcaaaatgcaccagattgcaaccgacggcggtcacatcgatatcgcctacgtatcacctcttgcaaaggtgtttatcccaactatcgtgcgctctttcctcaccgaaaaggaaaataaaaatatcacgttcaatttctttcaggacatcacctctgtgaatattgagggattaaaaaaaggcaggtatgacataattttcggttcatactcgccagatgaaaatggtattgattttgttcctattataaggcaggaaatagttgccatactgcctcccggccacccactgacacttaaggataccatggaagccactgatttcgctgactatcctgtgctcggctatgccagacactcaggccttggcaagtacaccagaagctttttcaagaagcatgatgtatcgccaaacttcatatgtgagtcacccgatgagaacggcatcgcctccctcgtggcgcagggctttggcattgcgcttgtcgcagatgtcgatgcaattcaccgcgatgacatctgcatacgccacctcgtttcgcatgagtcattctcacacactgtatacatgggctacatgacaggcaaataccagcttccggctatcaagcgcttcatagagtttgtgcgggaaagctgcagctaggcagtctcctcgatcacaaacctgataaatgccttcgcaaccggtgataaatatctctgcttaagcgttgccagatacaccgctctctcataaggaggattgtatatatcaagcgtctttacagaaagtgaccgaagtattggaatatcaggcatcacagctattccaaagccctgcgccacgagacccgccatactcgaatcctcctccatctcgaaggctaccttcggaaactgtcctatctcctcaaacatctgatcaatgaccggacgcaaaccgctgcccttctcaaaataaatctgcggatactctattgtatcgcgcaaatccacactgtcctttatggaaagcggatggtccatgggcactgcaagcacaagcttctgattcgcgatcttcttaaaatctatatcctgttccccatccttataagaagagaaaactatgtcatatttgtcatcctttagtccatctataatctctccggttgttccaaccgtaaaatgaaattctatatcataatccgggtatgcatcgagaaatttacgcaccagctttggcgcgaactcacttcccatcgtatatatatatgccagatgtataattccatgcctgctgccattgacctcctgaatgcgctgcacaccctcattaagcacctttaatgattcctcaacatacggcagaaacatcttcccatatctggtcagcacgacatttcttccctttttctcaaacaaacgcgtgccaagctcctgctccagctgtgagattgcatggcttaaagacggctgcgtaatcgacagcatctgtgccgccctcgtataatgttcttcctgcgccagtaccttgaagtactgcaattgactcagattcatagtacaccccctatgtatttaatatatttattcgccggatgtccgcttgccctgcgctgcacaccggtggtatatgctcgatttatgacgtgtcgtgtgggagttatatgccgcctcaagcaaaagtggcgcggaaaatactcgttcaagcaacacagcctttagtataccaataaagtaaaaagcgcgtttgatttttcgcgcctaataaactctgtttgaggcggcatttactcccactagactaaggaattatgagagcatataccaccggtgtgcagcgcagggcaagcggacatccggcaaatgctcataacaaagtctaaaaataatatacaccatttgatagacaaaaactatagatttcgtataaaagatgcattggacatttatacatttttgctgtaccttgaatgtaacaagagcgcattgcactttttgattgttaaaaaaatcacatactttgtatatcgcagcctttgataacaaatattgacaatcagtttaatgaaacaaaactataatgtaatgagagcaatttacactaccgcgtgcccacccggttagcagattaaggagaaaaaatactatgaaaaacaaatatccacatatttttgagccaattacagtacgcagaatgacagtaaagaaccgtatcgtcatgactccaatgggaactaactacggtgagcagaacggagaaatgagctttctccacatcaactactatgagcagagagcaaagggcggcactggtctcatcatcgttgagaatgcaagcgtcgactctccgcagggttcaaacggaactacacagcttcgtattgatttggacaactacatcccaagacttttcaagctctgcgagagtgttcacaagcatggtgcatgtatcgcaatacagttaaatcacgccggtgcttctgcaatgagctcacgtatcggaatgcagcctgtatcagcatcagacataccttcaaaggcaggtggggaaatcccaagacctctcgagaaggacgaaatcatgcatatcgtaaagaaatacggtgaggcagccaagcgtgcccagatctgtggcttcgacgctgttgaaatccacgcaggacactcttaccttatcagtcagttcctttcccctatcacaaacaagagaactgacgagttcggcggctctgccgagaaccgtgcaagatttgcaaagctggttatcgaggaggttcgtaagcaggttggacctttcttccctatcttcgtccgtatcagtgcagacgagctcatggagggtggaaacacacttgaggatacacttgagtacttaaagtattttgaaaaggaagtagatgtattcgacgtatcatgtggtctcaacggatctatccagtaccagattgatgcaaactacttacctgacggatggcgctcattcatggcaaaggctgtaaaagagaaatacaacaagccatgtatcacagtaggaaatatccgtgacccacaggtagccgaggatatccttgcaggaggcgatgctgatttcatcggtatgggccgtggacttatcgctgaccctgagtgggttaataaggtagagttcggaaatgtgtgcgatatcagaaaatgtatctcatgtaacatcggatgcgccggacacagaatcggtctcaaccagccaatccgctgtacagtaaaccctgccgtaaacagcggtgaggattacatgaagacaaaggtaaacaagccttgcaacgtggttgtaatcggtggtggtactgccggtcttgaggcagcctgcacagcagcagaggttggatgtacaaccttcctcattgagaagaaggcagagcttggcggacttgcatcagttatctccaagattcctgacaagaagcgtcttgcagacttccctaactacatgattcaccgtgcaagcaagcttcacaacctgtttgttttcaaaaatacagcagcaacagttgatatggtaaaggccttaaaccctgatatcattgtaaacgcaacaggctctgtacctactctcccacctatcacaggtcttcacgatctcgttgacaaggatggcacaaatgttgcaacagtccttaagatgattgagcgcatcaatgagtatcctgaggatatgaagggacagaaaatcgccatcatcggcggtggtgccgtaggtcttgacgtgatggaattcttcacagaaagaggcgcagaggtaacaatggttgagatgcttccaatgattggaaacggacttgaccctgtcacaaagtgtgacacaaacgcaaaaatggcaaaatacggtgtaaaacagatgaccaacactgctctgcaggaggttaagaatgaccgtttcatcgtaaagaatccagagggtgagattgaggaaatcccatttgattacggattcatctgccttggtatgagagccaacacacctgttctttcagagatcgatgaggctttcagtaataccaatgttgaaatcgtaaatatcggagacagcaagcgtgcccgcagaatcattgagggtacagaggaaggcagaaatatcttaaacgtgcttgcccgtcacgattatttataaaacttcgtaactatttctgattacgggaatagttgcaaaattctcctttaaaataataaacctataaaatcgagtaggaggcggtgactaaccgccgtcctctcacagcaccgtacgtaccgttcggtatacggcgctttcaatagttgacgtgcacagactgataggctgtggctaaatcgtaaaagccactgtttatcagtctttctttattcagcgcccaaatcacagctttgttattgctgatataccaatactttctgcgactgtttgctattgttgacgcatagtgttctgggattccaagtttgactagatttttatatttcgttctaggtttcttccactgtttccatatgcacatgcgtattctgtgatagagccatccgttgatgtcatctatgttgctcttcatgcttgcaattccgtagtagttaagccatccccttgcatacaccttgattttctcaaggcttggcttgattgactgacatcgcttacgggaagataactccttcaatctggacttaaacttcttccatgacttcggatgaactcggacataagtgcctttcccgttccttcccaatgcaaagccaaggaatttaaaatttcggattgcaaacacgctgacagtacggctcttttctcggttgactgtaagtttcagcctcttctcaagatattttgtactgctttccaagagtctctctgatgctcgtccgctctttgcaagaagcacgatgtcatctgcatatcttatgcatggaacacctcttttcaggaactcctggtcgaactcattgaggtagacatttgccagcaatggtgatagatttccaccttgtggtgagccttcctctgtgtcaatgaccactccgttttccattacaccgcttttcagatagcgctttatcaactgtactacacgttcatcttttacattcttccggagaagattgatgagaatttcgtgattaagagtatcgaagtactttgacaagtcaaggactacagcgaatgtatagccttgttctgcatactccttaaccttaagtattgcatcttttgcacttctgttcggacgatagccatagctaccatctgcaaacagcggttcatagattggcactaactgttgggttattgcctgttgaagtgtacggtctatcactgttggtatgccaagctttcgcacaccaccatctggtttgggaatttcaactcgtcttactggagacggagtatactttccacgataaatgcggtcagttatctcttgttgatgttcctttagatatggaagagcctcttcaatggtcatgccatcaattcccggcgctcccttgtttgccttaactctcttatacgctctgttaaagttgtctttatacagtatcgtttccaaaagtctcggctgtgcactgtctctttctttccatatccgattgaatgacctggacgctttcacatacccttcatgttccgcattatctctttgcgaacagccattgttttcaatgttttctgccatagacggtcattcctcctttctcggtcatactcaagactcctactgattcggtccttcacctctcggctactatgacctctgctgacttctatgcgttcagcattgctttatgcaatggttacctctttcaaggcataccgcacagacctccctaggtaccacacgtttcttcctctccatccatctgcctcatttatcatgcatgattccgtgtagttattgggctttaacatgggttgctgtcttacccacatgcatgacctcatatgagatttctgttcgtcagaccagagatttgcccgtgagttggtatattcctcacatccagcttccttcagattccatctcacgatggacacccttgccttcggctatatccttcccactaccgggcggattcgggactttaacccgttagaaacgtgcgccgctaggcgcacaactcctaaaaaacaacagctcgcgggaaaccgcgagctgttgttttttattccgctctaactttagcactttaaacaaaaaaagtgcttgcgtatatccaataaaagagttatcataatacaaaatgaaacacttaggaggatttacaatggaaaagcgtatttcaggtcacacaggcttattagcactcataggatcaccggtcggtcattcaggttcaccggctatgtacaactacagttttgaaaaactcggtctggactatgcatatgttgcatttgatataaaagaagacaaggttaaggatgctattgcagcaatgaagacattcaacatgcgtggatgtaatgtgaccatgcctgataaggtagaggctgcaaagtacatggatgagctttcaccggcagcccagattattggagccataaacactatcgtaaatgacaacggcaagcttacaggacacatcacagacggtgagggattcgtacacaacttaaaggatcacggaatcgacatcaaaggaaagaaaatcacagtagccggaggaggcggagctgctacagctattcaggtgcaatgcgcattggacggagctcgtgagattactattttcaacaaaaatgatgctttcttcgagcgtacactacagactgcagagaagattaaaaaagcagttcctgactgtgttgtaaatgtatatgatattgatgatacagccaagatgacagaggaaatccagtcaagcgatatctttgcaaatgcaacaatcgttggcatgaagcctctggatgatcagagcgtggtaaaagatctttcagctttcagaccggggcttgtagttgcagatgcagtttacaatccgcaggagacaaagcttcttcgcgaagcaaaagaggcaggctgcacatgcgtaggcggaaagggaatgctcttatggcagggcgtcgccgcattcaagctttacacaggacaggatatgccggttgacgatgtgaagaaactgttcttcagctagaacataatcatgtaaaaaggagagtatcgctactctcctttttgtatctaaagcagtgagtggtttcaatatatcccactttttctttattcatgcagatggaatatagaaataagttactaggagcagaaaacattctgatctttatgcagttacatggtgcgtagccgcaaaggaatcgaaatgctgatcaatctgataaatatcagctattcctcaatgaagcttttgccttaagcgaaggaattcgcagccatgtattttttgccactttcatacagaaagtcgaaacccagataaaatcaacatcttttataaatgccttaaaccaggcattttcgcaaaatatgagtcatctataaagttgtaaagtggtgtaaatctaactccatatattaaaaatatttattatcccaaaagttgttttttattttctacagtcaattcgagatatgcatgaatcaaatcattatacatagcttgaatgaatcggcaatttttactatctgatttttgggtagtacctgcattaacaagattttcatttggacatgcacctacacataagtttctagcccaacaatttttacactccttatgcttctcaagagtaatttcttctaaaaacggcatcttttctatttttgtatcttttaatacatttcccatagcgtactctttatttgctacaaatctgtgacatggataaatttctccattaatatcaactgcaagttgtgcactgcccactccgcataaaatttttcttgcgacaccacttttgtgtatcttctgaagaccggacatcaaaatccgaagttttttagcggtcttataatcacctgactgtataagttctaaaaagtactgtacaagttttgtgttttctccaatcaatctgtcataatcttcatccgaaagcaaattttgtgctggtgccatcggtatgcttctaaatttcatatcattaagtgctttaaaattatcaaccaaatctagatttgttgctgtaattgtagctcttcctgatactaatccatcatttctcatatttctggtattcttttccatgacatcaaaactgcctagaccatttgcatagaaacgattacagttatggacatctttgttaccatctacgctaatttggactgtaaagtgtttctcacgtaagaatttttcaatttcatcattccaaatagttccatttgtagtgatcgtatacttaaaatgaatcggtttatcattttcatatttgttacagtatgctactacgtctttgattaaaggaaaattcatcaatggttctccacctaaaaaacaaatcagaagttctttattcttggaatttccaataagaaaatcaatagatttctttgctgtttctaatgacattttccctctatcttgatattctcctccctctccatagcaatatgtacaccttaaattacattcttgtataatcattaatgtgagcccattgagagtgatttcttctttcttttcctcttttaaaactggtcccttatcacttacaattaatcctgctctcaccatattatcaaacagggtctgaaattcctctttagtcattatatcagataactctacatacgcatcattgaattttagaccttccaaacttaacattttctttgatttttcatcaagtaaaaatattgcgttatcatctatcaaatataaatattgattaccaattttatcctgaaatatcttatatgagttatattttaacattactatttaccacctctaataaatgggcagaattcaataaccctgcccattttcctgaaattaacctacaaagtcatcagctaatccatcacagaaaacacatcctaaatcagcacaagtatctgttgcatcgcaccataaacaaggtcctttctgttctttgatttcatcaactttttcattaatctgactgaacatatatgtagccctcctttttattttatttcagattttcatctgctaaagtaattttagtattatacagc
